(19) United States
(12) Patent Application Publication
(10) Pub. No.: US 2011/0130442 A1
(43) Pub. Date: Jun. 2, 2011

(54) NUCLEIC ACID CAPABLE OF CONTROLLING DEGRANULATION OF MAST CELL

(75) Inventors: Kyoko Kosaka, Himeji-shi (JP); Yoji Yamada, Sunto-gun (JP); Kazumi Miura, Sunto-gun (JP); Tatsuya Miyazawa, Machida-shi (JP); Tetsuo Yoshida, Machida-shi (JP)

(73) Assignee: KYOWA HAKKO KIRIN CO., LTD., Chiyoda-ku (JP)

(21) Appl. No.: 12/996,082

(22) PCT Filed: Jun. 4, 2009
(86) PCT No.: PCT/JP2009/060288

§ 371 Date: Feb. 11, 2011

(30) Foreign Application Priority Data
Jun. 4, 2008 (JP) 2008-146431

(51) Int. Cl. A61K 31/7088; C07H 21/04; C12N 15/63; C07H 21/02; A61P 17/00; A61P 11/06; A61P 37/08; C12N 5/00; C40B 30/06

(52) U.S. Cl. 514/44 A; 536/23.1; 435/320.1; 536/24.5; 435/375; 506/10

(57) ABSTRACT

Provided are a mast cell degranulation control agent, a diagnostic agent or therapeutic agent for a disease resulting from mast cell degranulation control, a method of controlling mast cell degranulation, and a screening method for a mast cell degranulation control agent, all of which involve the use of a nucleic acid and the like. These are useful in the diagnosis or treatment of a disease resulting from mast cell degranulation control.

### TECHNICAL FIELD

[0001] The present invention relates to a mast cell degranulation control agent, a diagnostic agent or therapeutic agent for a disease resulting from an abnormality of mast cell degranulation control, a method of controlling mast cell degranulation, and a screening method for a mast cell degranulation control agent.

### BACKGROUND ART

[0002] Micro-RNA (miRNA), which is one kind of nucleic acids, is a small non-coding single-stranded RNA of about 22 nucleotides that is not translated into a protein, and has known as being present in many types in organisms, including humans (non-patent documents 1 and 2). A micro-RNA is produced from a gene transcribed to a single or clustered micro-RNA precursor. Specifically, first, a primary-miRNA (pri-miRNA), which is a primary transcript, is transcribed from the gene, then, in stepwise processing from the pri-miRNA to a mature type micro-RNA, a precursor-miRNA (pre-miRNA) of about 70 nucleotides having a characteristic hairpin structure is produced from the pri-miRNA. Furthermore, the mature type micro-RNA is produced from the pre-miRNA by Dicer-mediated processing (non-patent document 3).

[0003] A mature type micro-RNA is thought to be involved in the post-transcriptional control of gene expression by complementarily binding to an mRNA for a target to suppress the translation of the mRNA, or to degrade the mRNA.

[0004] Although the mechanism in which micro-RNAs suppress the expression of target mRNAs has not been clarified in full, its outline is being elucidated through recent years' research. A micro-RNA suppresses the expression of the mRNA for a target by binding to a partially complementary sequence in the 3′-untranslational region (3′-UTR) of the target mRNA to suppress the translation thereof, or to degrade the target mRNA. Although the complementarity may not be complete, it has been shown that the complementarity of the 2nd to 8th nucleotides from the 5′-end of the micro-RNA is particularly important; this region is sometimes called the “seed sequence” of the micro-RNA (non-patent document 4). It has been shown that micro-RNAs having a same seed sequence suppress the expression of a same target mRNA even if their other sequences differ. Therefore, by making a sequence complementary to a sequence present at the 3′-end of an optionally chosen mRNA as the seed sequence, an RNA having micro-RNA-like activity can be designed. Usually, the term micro-RNA, unlike siRNA, often refers exclusively to an RNA that occurs naturally in cells, so a micro-RNA-like sequence designed as described above is sometimes particularly referred to as an artificial micro-RNA.

[0005] As of August 2007, in the micro-RNA database miRBase (http://microrna.sanger.ac.uk/), 533 species of micro-RNAs were registered for humans, and 5,071 species for all organisms. Of the micro-RNAs expressed in mammals, including humans, only some have their physiological functions elucidated to date, including miR-181, which is involved in hematopoietic lineage differentiation (non-patent document 5), miR-375, which is involved in insulin secretion (non-patent document 6), and the like; many have their bioactivities unclarified. However, studies using nematodes or Drosophila have shown that micro-RNAs play various important roles in the development and differentiation in organisms, and a report of the relation to human diseases has been reported suggesting a profound relation to cancers (non-patent document 7).

[0006] Mast cells are known to become activated by various stimuli to undergo degranulation and release or produce many inflammatory mediators (Non-patent Documents 8 to 10). These mediators are diverse and include amines, arachidonic acid metabolites, proteases, cytokines, chemokines and the like. For example, it is known that when an antigen is recognized by a mast cell, histamine and tryptase are quickly released upon degranulation, and chemical mediators such as prostaglandin D2 (PGD2), leukotriene (LT), and platelet activation factor (PAF), various chemokines such as macrophage inflammatory protein (MIP)-1α, and various cytokines such as granulocyte macrophage colony stimulation factor (GM-CSF) are newly synthesized and released. Regarding major basic proteins, which are cytotoxic proteins that have been thought to be produced by eosinophils, it has recently been shown that in the case of humans, they are produced in large amounts by mast cells (non-patent document 11).

[0007] Hence, mast cells are thought to play major roles in the pathogenesis of various allergic diseases; therefore, it is thought that by controlling a function of mast cells, treatment of allergic diseases is possible.

[0008] Although a wide variety of existing therapeutic agents for allergies are known to possess the action of suppressing the release of inflammatory mediators from mast cells, their studies have traditionally been conducted mainly using rodent mast cells, and there have been no adequate investigations of whether the existing therapeutic agents are actually effective on human mast cells. However, recently, a method of preparing human mast cells has been established, enabling analyses of the actions of existing drugs on human mast cells, and enabling comparisons with their actions on rodent mast cells. As a result, it is known that rodent mast cells and human mast cells have different reactivities to drugs (non-patent document 9). For example, sodium cromoglicate, which was used as a suppressant of inflammatory mediator release, remarkably suppressed the IgE-dependent release of inflammatory mediators in rat abdominal mast cells, but the action thereof on human mast cells was not potent (non-patent document 12). Azelastine hydrochloride, at high concentrations, suppressed the release of histamine, PGD2, and LT and production of GM-CSF and MIP-1α, from human mast cells in culture, but none of these activities were potent. Suplatast tosilate, which was used as an anti-cytokine drug, exhibited inflammatory mediator release suppressive action on rat mast cells, but lacked action on human mast cells (non-patent document 12).

[0009] Genes expressed in mast cells are important in that they are potential targets of therapeutic agents for a wide variety of allergic diseases; for example, drugs that act on GPCR expressed in mast cells are known to remarkably suppress the production of inflammatory mediators from cultured human mast cells. Specifically, the β2 adrenaline receptor stimulant isoproterenol suppresses the release of histamine, LT, PGD2, GM-CSF and MIP-1α from cultured human mast cells by 80% or more at a low concentration of 10 nmol/l (Non-patent Document 13).

[0010] As a result of a comparison of genes whose expression is induced in human and mouse mast cells activated by various stimuli, it was shown that the genes expressed in humans and mice do not always agree with each other (Non-patent Document 14). Additionally, as stated above, there are also interspecific differences in drug susceptibility between humans and mice.

[0011] In view of the association of micro-RNAs in gene expression control, it is thought that micro-RNAs expressed in mast cells can also be candidates for therapeutic agents for a wide variety of allergic diseases. At present, an analysis of micro-RNAs expressed in mouse marrow-derived mast cells (Non-patent Document 15) is the only available relevant report, with no reports on micro-RNAs expressed in human mast cells. Taking into account the interspecific differences between humans and mice, it is difficult to predict information on the expression of micro-RNAs in human mast cells on the basis of information on the expression of micro-RNAs in mouse mast cells. Additionally, there is no knowledge about the involvement of micro-RNAs in the diverse functions of mast cells.

### CONVENTIONAL ART DOCUMENTS

### Non-Patent Documents

[0012] non-patent document 1: Science, 294, 853-858, (2001)
[0013] non-patent document 2: Cell, 113, 673-676, (2003)
[0014] non-patent document 3: Nature Reviews Genetics, 5, 522-531, (2004)
[0015] non-patent document 4: Current Biology, 15, R458-R460 (2005)
[0016] non-patent document 5: Science, 303, 83-86, (2004)
[0017] non-patent document 6: Nature, 432, 226-230, (2004)
[0018] non-patent document 7: Nature Reviews Cancer, 6, 259-269, (2006)
[0019] non-patent document 8: Himan Saibo no Rinsho, ed. Motohito Kurosawa, Sentan Igaku-sha Ltd., p 142 (2001)
[0020] non-patent document 9: Himan Saibo no Rinsho, ed. Motohito Kurosawa, Sentan Igaku-sha Ltd., p 559 (2001)
[0021] non-patent document 10: Crit. Rev. Immunol., 22, 115-140 (2002)
[0022] non-patent document 11: Blood, 98, 1127-1134 (2001)
[0023] non-patent document 12: Clin. Exp. Allergy, 28, 1228-1236 (1998)
[0024] non-patent document 13: J. Allergy Clin. Immunol., 103, 421-426 (1999)
[0025] non-patent document 14: Blood, 100, 3861-3868 (2002)
[0026] non-patent document 15: Genome Biology, 6, R71 (2005)

### SUMMARY OF THE INVENTION

### Problems to be Solved by the Invention

[0027] It is expected that by identifying nucleic acids such as micro-RNAs and precursors thereof expressed in various human organs, and analyzing the functions thereof to elucidate their relations to diseases, new therapeutic agents and diagnostic agents will be developed.

[0028] In particular, finding nucleic acids, such as micro-RNAs and precursors thereof, that act in mast cells is expected to lead to the elucidation of functions such as mast cell differentiation and degranulation, cytokine-producing mast cell differentiation and degranulation, inflammatory mediator production, cytokine production, and chemokine production, and hence lead to the development of methods of mast cell isolation, cultivation, differentiation control, degranulation control, inflammatory mediator production control, cytokine production control, and chemokine production control, and new therapies for allergic diseases and the like involving the utilization thereof.

[0029] It is an object of the present invention to provide a mast cell degranulation control agent, a diagnostic agent or therapeutic agent for a disease resulting from mast cell degranulation control, a method of controlling mast cell degranulation, and a screening method for a mast cell degranulation control agent, all of which involve the use of a nucleic acid and the like.

### Means for Solving the Problems

[0030] The present invention relates to the following (1) to (18).

(1) A mast cell degranulation control agent comprising as an active ingredient any one of the nucleic acids (a) to (h) below:
(a) a nucleic acid consisting of a nucleotide sequence of any one of SEQ ID NOs:1 to 1543 and 3372 to 3741,
(b) a nucleic acid of 17 to 28 nucleotides comprising a nucleic acid consisting of a nucleotide sequence of any one of SEQ ID NOs:1 to 1543 and 3372 to 3741,
(c) a nucleic acid consisting of a nucleotide sequence having an identity of 90% or more to a nucleotide sequence of any one of SEQ ID NOs:1 to 1543 and 3372 to 3741,
(d) a nucleic acid that hybridizes under stringent conditions with a complementary strand for a nucleic acid consisting of a nucleotide sequence of any one of SEQ ID NOs:1 to 1543 and 3372 to 3741,
(e) a nucleic acid comprising the 2nd to 8th nucleotides of a nucleotide sequence of any one of SEQ ID NOs:1 to 1543 and 3372 to 3741,
(f) a nucleic acid consisting of a nucleotide sequence of any one of SEQ ID NOs:1544 to 3371 and 3742 to 4147,
(g) a nucleic acid consisting of a nucleotide sequence having an identity of 90% or more to a nucleotide sequence of any one of SEQ ID NOs:1544 to 3371 and 3742 to 4147, and
(h) a nucleic acid that hybridizes under stringent conditions with a complementary strand for a nucleic acid consisting of a nucleotide sequence of any one of SEQ ID NOs:1544 to 3371 and 3742 to 4147.
(2) The mast cell degranulation control agent according to (1), wherein the nucleic acid is a micro-RNA or a micro-RNA precursor.
(3) A mast cell degranulation control agent comprising as an active ingredient a nucleic acid consisting of a nucleotide sequence complementary to the nucleotide sequence of the nucleic acid of (1).
(4) A mast cell degranulation control agent comprising as an active ingredient a double-stranded nucleic acid consisting of the nucleic acid of (1) and a nucleic acid consisting of a nucleotide sequence complementary to the nucleotide sequence of the former nucleic acid.
(5) A mast cell degranulation control agent comprising as an active ingredient a vector that expresses the nucleic acid of any one of (1) to (3) or the double-stranded nucleic acid of (4).
(6) A mast cell degranulation control agent comprising as an active ingredient a substance that controls the expression or a function of the nucleic acid of (1).
(7) The mast cell degranulation control agent according to (6), wherein the substance that controls the expression or a function of the nucleic acid is an siRNA or an antisense oligonucleotide.
(8) A mast cell degranulation control agent comprising as an active ingredient a substance that suppresses the expression of a target gene for the nucleic acid of (1).
(9) The mast cell degranulation control agent according to (8), wherein the substance that suppresses the expression of a target sequence for a nucleic acid is an siRNA or an antisense oligonucleotide.
(10) A diagnostic agent or therapeutic agent for a disease resulting from an abnormality of mast cells, comprising as an active ingredient the nucleic acid of any one of (1) to (3), the double-stranded nucleic acid of (4), the vector of (5), or the substance of any one of (6) to (9).
(11) A diagnostic agent for a disease resulting from an abnormality of mast cells, comprising as an active ingredient a reagent for detecting the amount, expressed of the nucleic acid of (1), a mutation of the nucleic acid or a mutation of the genome that encodes the nucleic acid.
(12) The diagnostic agent or therapeutic agent according to (10) or (11), wherein the disease resulting from an abnormality of mast cells is a disease selected from the group consisting of atopic dermatitis, asthma, chronic obstructive pulmonary disease and allergic diseases.
(13) A method for treating a disease resulting from an abnormality of mast cells, comprising administering an effective amount of the degranulation suppressant of any one of (1) to (9) to a subject in need thereof.
(14) The method according to (13), wherein the disease resulting from an abnormality of mast cells is a disease selected from the group consisting of atopic dermatitis, asthma, chronic obstructive pulmonary disease and allergic diseases.
(15) A use of the degranulation suppressant of any one of (1) to (9) for producing a therapeutic agent for a disease resulting from an abnormality of mast cells.
(16) The use according to (15), wherein the disease resulting from an abnormality of mast cells is a disease selected from the group consisting of atopic dermatitis, asthma, chronic obstructive pulmonary disease and allergic diseases.
(17) A method of controlling mast cell degranulation, comprising using the nucleic acid of any one of (1) to (3), the double-stranded nucleic acid of (4), the vector of (5), or the substance of any one of (6) to (9).
(18) A screening method for a mast cell degranulation control agent, wherein the promotion or suppression of the expression or a function of the nucleic acid of (1) serves as an index.

### Effect of the Invention

[0031] According to the present invention, it is possible to provide a mast cell degranulation control agent, a diagnostic agent or therapeutic agent for a disease resulting from mast cell degranulation control, a method of controlling mast cell degranulation, and a screening method for a mast cell degranulation control agent, all of which involve the use of a nucleic acid and the like.

### MODE FOR CARRYING OUT THE INVENTION

[0032] The nucleic acid used in the present invention may be any molecule, as far as it is a molecule resulting from polymerization of a nucleotide or a molecule functionally equivalent to the nucleotide; for example, an RNA, which is a ribonucleotide polymer, a DNA, which is a deoxyribonucleotide polymer, a mixed polymer of RNA and DNA, and a nucleotide polymer, including a nucleotide analogue, can be mentioned; furthermore, the nucleic acid may be a nucleotide polymer, including a nucleic acid derivative. In addition, the nucleic acid in the present invention may be a single-stranded nucleic acid or a double-stranded nucleic acid. Double-stranded nucleic acids include double-stranded nucleic acids wherein one strand hybridizes with the other strand under stringent conditions.

[0033] The nucleotide analogue may be any molecule, as far as it is a molecule prepared by modifying a ribonucleotide, a deoxyribonucleotide, an RNA or a DNA in order to improve the nuclease resistance thereof, to stabilize the same, to increase the affinity thereof for a complementary chain nucleic acid, to increase the cell permeability thereof, or to visualize the same, compared with the RNA or DNA; for example, a nucleotide analogue modified at the sugar moiety thereof, a nucleotide analogue modified at phosphoric acid diester bond and the like can be mentioned.

[0034] The nucleotide analogue modified at the sugar moiety thereof may be any one, as far as an optionally chosen chemical structural substance has been added to, or substituted for, a portion or all of the chemical structure of the sugar of the nucleotide; for example, a nucleotide analogue substituted by 2′-O-methylribose, a nucleotide analogue substituted by 2′-O-propylribose, a nucleotide analogue substituted by 2′-methoxyethoxyribose, a nucleotide analogue substituted by 2′-O-methoxyethylribose, a nucleotide analogue substituted by 2′-O-[2-(guanidium)ethyl]ribose, a nucleotide analogue substituted by 2′-O-fluororibose, a bridged nucleic acid (BNA) having two cyclic structures as a result of introduction of a bridging structure into the sugar moiety, more specifically a locked nucleic acid (LNA) wherein the oxygen atom at the 2′ position and the carbon atom at the 4′ position have been bridged via methylene, and an ethylene bridged nucleic acid) (ENA) [Nucleic Acid Research, 32, e175 (2004)] can be mentioned, and a peptide nucleic acid (PNA) [Acc. Chem. Res., 32, 624 (1999)], an oxypeptide nucleic acid (OPNA) [J. Am. Chem. Soc., 123, 4653 (2001)], and a peptide ribonucleic acid (PRNA) [J. Am. Chem. Soc., 122, 6900 (2000)] and the like can also be mentioned.

[0035] The nucleotide analogue modified at phosphoric acid diester bond may be any one, as far as an optionally chosen chemical substance has been added to, or substituted for, a portion or all of the chemical structure of the phosphoric acid diester bond of the nucleotide; for example, a nucleotide analogue substituted by a phosphorothioate bond, a nucleotide analogue substituted by an N3′-P5′ phosphoamidate bond, and the like can be mentioned [SAIBO KOGAKU, 16, 1463-1473 (1997)] [RNAi Method and Antisense Method, Kodansha (2005)].

[0036] The nucleic acid derivative may be any molecule, as long as it is a molecule prepared by adding another chemical substance to the nucleic acid in order to improve the nuclease resistance thereof, to stabilize the same, to increase the affinity thereof for a complementary chain nucleic acid, to increase the cell permeability thereof, or to visualize the same, compared with the nucleic acid; for example, a 5′-polyamine conjugated derivative, a cholesterol conjugated derivative, a steroid conjugated derivative, a bile acid conjugated derivative, a vitamin conjugated derivative, a Cy5 conjugated derivative, a Cy3 conjugated derivative, a 6-FAM conjugated derivative, a biotin conjugated derivative and the like can be mentioned.

[0037] As examples of nucleic acids used in the present invention, the following nucleic acids (a) to (k) can be mentioned.

(a) A nucleic acid consisting of a nucleotide sequence of any one of SEQ ID NOs:1 to 1543 and 3372 to 3741.
(b) A nucleic acid of 17 to 28 nucleotides comprising a nucleic acid consisting of a nucleotide sequence of any one of SEQ ID NOs:1 to 1543 and 3372 to 3741.
(c) A nucleic acid consisting of a nucleotide sequence having an identity of 90% or more to a nucleotide sequence of any one of SEQ ID NOs:1 to 1543 and 3372 to 3741.
(d) A nucleic acid that hybridizes under stringent conditions with a complementary strand for a nucleic acid consisting of a nucleotide sequence of any one of SEQ ID NOs:1 to 1543 and 3372 to 3741.
(e) A nucleic acid comprising the 2nd to 8th nucleotides of a nucleotide sequence of any one of SEQ ID NOs:1 to 1543 and 3372 to 3741.
(f) A double-stranded nucleic acid consisting of one of the nucleic acids (a) to (e) and a nucleic acid comprising a nucleotide sequence complementary to the nucleotide sequence of the nucleic acid, or a nucleic acid comprising the double-stranded nucleic acid.
(g) A double-stranded nucleic acid consisting of one of the nucleic acids (a) to (e) and a nucleic acid that hybridizes under stringent conditions with the nucleic acid, or a nucleic acid comprising the double-stranded nucleic acid.
(h) A single-stranded nucleic acid having a hairpin structure wherein the double-stranded nucleic acid (f) or (g) is joined via a spacer oligonucleotide consisting of 8 to 28 nucleotides, or a nucleic acid comprising the single-stranded nucleic acid.
(i) A nucleic acid consisting of a nucleotide sequence of any one of SEQ ID NOs:1544 to 3371 and 3742 to 4147.
(j) A nucleic acid consisting of a nucleotide sequence having an identity of 90% or more to a nucleotide sequence of any one of SEQ ID NOs:1544 to 3371 and 3742 to 4147.
(k) A nucleic acid that hybridizes under stringent conditions with a complementary strand for a nucleic acid consisting of a nucleotide sequence of any one of SEQ ID NOs:1544 to 3371 and 3742 to 4147.

[0038] As the above-described nucleic acids, micro-RNAs are preferably used. A micro-RNA refers to a single-stranded RNA 17 to 28 nucleotides long. The peripheral genome sequence, including the sequence, of a micro-RNA has a sequence capable of forming a hairpin structure, and the micro-RNA can be cut out from either one strand of the hairpin. A micro-RNA complementarily binds to an mRNA serving as a target therefor to suppress the translation of the mRNA or promote the decomposition of the mRNA, thereby mediating the post-translational control of gene expression.

[0039] As examples of micro-RNAs used in the present invention, human micro-RNAs consisting of a nucleotide sequence of any one of SEQ ID NOs: 1 to 150 and 3372 to 3406 can be mentioned. Furthermore, as micro-RNAs having the same function as the function of human micro-RNAs consisting of a nucleotide sequence of any one of SEQ ID NOs: 1 to 150 and 3372 to 3406, nucleic acids consisting of a nucleotide sequence of any one of SEQ ID NOs: 151 to 1237 and 3407 to 3684, which are orthologues of the human micro-RNAs, can be mentioned. As specific examples of orthologues of the human micro-RNA of SEQ ID NO:1, those consisting of a nucleotide sequence of any one of SEQ ID NOs:151 to 173 and 3407 can be mentioned. Tables of the correspondence of micro-RNAs consisting of a nucleotide sequence of any one of SEQ ID NOs:1 to 150 and 3372 to 3406 and orthologues thereof are shown in Table 1-1 to Table 1-8. The biological species shown in the uppermost fields of Table 1-1 to Table 1-8 are as follows: hsa, Homo sapiens, human being; mmu, Mus musculus, mouse; rno, Rattus norvegicus, rat; xla, Xenopus laevis, African clawed toad; xtr, Xenopus tropicalis, tropical clawed toad; gga, Gallus gallus, chicken; cfa, Canis familiaris, dog; mdo, Monodelphis domestica, gray short-tailed opossum; age, Ateles geoffroyi, black-handed spider monkey; lla, Lagothrix lagotricha, Humboldt's wooly monkey; sla, Saguinus labiatus, red-bellied tamarin; mml, Macaca mulatta, rhesus monkey; mne, Macaca nemestrina, pig-tailed macaque; ggo, Gorilla gorilla, gorilla; ppa, Pan paniscus, bonobo; ptr, Pan troglodytes, chimpanzee; ppy, Pongo pygmaeus, orangutan; Ica, Lemur catta, ring-tailed lemur; cgr, Cricetulus griseus, Chinese hamster; bta, Bos taurus, cattle; oar, Ovis aries, sheep; ssc, Sus scrofa, swine; dre, Danio rerio, zebrafish; fru, Fugu rubripes, globefish; tni, Tetraodon nigroviridis, green spotted puffer. Because human-derived micro-RNAs and orthologues thereof have high sequence identity, they are considered to possess similar functions. Also because micro-RNAs in the same subgroup as classified by alphabetical figures added to the ends of their names also share high sequence identity, they are considered to possess similar functions.

TABLE 1-1

| sequence | | Orthologue sequence number | | | | | | | | | | | | |
|---|---|---|---|---|---|---|---|---|---|---|---|---|---|---|
| number | human miRNA | mmu | rno | cgr | age | lla | sla | mml | mne | pbi | ggo | ppa | ptr | ppy |
| seqNo | miRNAname | mmu | rno | cgr | age | lla | sla | mml | mne | pbi | ggo | ppa | ptr | ppy |
| 1 | hsa-miR-16 | 151 | 152 | | 153 | 154 | 155 | 156 | 157 | | 158 | 159 | 160 | 161 |
| 2 | hsa-miR-195 | 174 | 175 | | | | | 176 | | | 177 | 178 | | |
| 3 | hsa-miR-17-3p | 3408 | 181 | | 182 | 183 | 184 | 185 | 186 | | 187 | 188 | 189 | 190 |
| 4 | hsa-miR-18a | 196 | 197 | 198 | 199 | 200 | 201 | 202 | | | 203 | 204 | 205 | 206 |
| | | 217 | | | | | 218 | | | | | | | |
| 5 | hsa-miR-18b | | | | | | | | | | | | | |
| 6 | hsa-miR-20b | 3412 | 224 | | 225 | 226 | 228 | 230 | | | 231 | 232 | 233 | 234 |
| | | 223 | 3413 | | | | 229 | | | | | | | |
| 7 | hsa-miR-21 | 250 | 251 | 252 | 253 | | | 254 | 255 | | 256 | 257 | 258 | 259 |
| 8 | hsa-miR-24 | 268 | 269 | | | | | 270 | 271 | | 272 | 273 | 274 | 275 |
| 9 | hsa-miR-25 | 285 | 286 | | | 287 | | 288 | 289 | | 290 | 291 | 292 | 293 |
| 10 | hsa-miR-32 | 301 | 302 | | | | 303 | 304 | 305 | | 306 | 307 | 308 | 309 |
| 11 | hsa-miR-26b | 3415 | 315 | | | 317 | | 318 | 320 | | 321 | 322 | 323 | 324 |
| | | 314 | 316 | | | | | 319 | | | | | | |
| 12 | hsa-miR-30a-3p | 3416 | 3418 | | | | | 338 | | | 339 | 340 | 341 | 342 |
| | | 3417 | 336 | | | | | | | | | | | |
| | | | 337 | | | | | | | | | | | |
| 13 | hsa-miR-34a | 347 | 349 | | 351 | 352 | 353 | 354 | 356 | | 357 | 358 | 359 | 360 |
| | | 348 | 350 | | | | | 355 | | | | | | |
| | | 3419 | | | | | | | | | | | | |
| 14 | hsa-miR-449 | 372 | 374 | | | | | 375 | | | | | | |
| | | 380 | | | | | | 381 | | | | | | |
| | | 373 | | | | | | | | | | | | |
| 15 | hsa-miR-499b | | | | | | | | | | | | | |
| 16 | hsa-miR-107 | 382 | 383 | | | 384 | | 385 | 386 | | 387 | 388 | 389 | 390 |
| 17 | hsa-miR-140 | | | | | | | | | | | | | 400 |
| 18 | hsa-miR-148b | 3420 | 3421 | | | | | 405 | | | | | | |
| | | 404 | | | | | | 406 | | | | | | |
| 19 | hsa-miR-190 | 418 | 419 | | | | | 421 | | | 423 | 424 | 425 | |
| | | 3422 | 420 | | | | | 422 | | | | | | |
| 20 | hsa-miR-199a | 3423 | 3425 | | | 431 | 432 | 433 | 434 | | 435 | 436 | 437 | 438 |
| | | 3424 | | | | | | 3426 | | | | | | |
| 21 | hsa-miR-199b | | | | | | | | | | | | | |
| 22 | hsa-miR-202* | | | | | | | | | | | | | |
| 23 | hsa-miR-208 | 3429 | | | | | 450 | | | | | | | |
| | | 448 | | | | | 451 | | | | | | | |
| 24 | hsa-miR-210 | 454 | 455 | | | | | 456 | | | | | | |
| 25 | hsa-miR-211 | 461 | 462 | | | | | 463 | 464 | | | | | 465 |
| 26 | hsa-miR-214 | 467 | 468 | | 469 | | 470 | 471 | 472 | | 473 | 474 | 475 | 476 |
| 27 | hsa-miR-218 | 484 | 485 | | 486 | 487 | 488 | 489 | 490 | | 491 | 492 | 493 | 494 |
| 28 | hsa-miR-299-5p | 3431 | 3432 | | | | | 506 | | | | | | |
| 29 | hsa-miR-325 | 3433 | 3434 | | | | | 507 | | | | | | |
| 30 | hsa-miR-328 | 509 | 510 | | | | | | | | | | | |
| 31 | hsa-miR-329 | 512 | 513 | | | | | 514 | | | | | | |
| 32 | hsa-miR-339 | 3435 | 515 | | | | | 3436 | | | | | | |
| 33 | hsa-miR-345 | | | | | | | | | | | | | |
| 34 | hsa-miR-425-5p | 3437 | 3438 | | | | | 3439 | | | | | | |
| 35 | hsa-miR-484 | 523 | 524 | | | | | 525 | | | | | | |
| 36 | hsa-miR-485-5p | 3441 | 3442 | | | | | 527 | | | | | | |
| 37 | hsa-miR-486 | 528 | | | | | | 3444 | | | | | | |
| 38 | hsa-miR-488 | 3445 | | | | | | | | | | | | |
| 39 | hsa-miR-510 | | | | | | | | | | | | | |
| 40 | hsa-miR-515-3p | | | | | | | | | | | | | |
| 41 | hsa-miR-515-5p | | | | | | | | | | | | | |
| 42 | hsa-miR-517* | | | | | | | | | | | | | |
| 43 | hsa-miR-520d | | | | | | | 3446 | | | | | | |
| | | | | | | | | 529 | | | | | | |
| | | | | | | | | 530 | | | | | | |
| | | | | | | | | 3447 | | | | | | |
| | | | | | | | | 531 | | | | | | |
| 44 | hsa-miR-520f | | | | | | | 532 | | | | | | |
| 45 | hsa-miR-520h | | | | | | | 3448 | | | | | | |
| | | | | | | | | 533 | | | | | | |
| 46 | hsa-miR-522 | | | | | | | 534 | | | | | | |
| 47 | hsa-miR-525* | | | | | | | | | | | | | |
| 48 | hsa-miR-573 | | | | | | | 535 | | | | | | |
| 49 | hsa-miR-587 | | | | | | | | | | | | | |
| 50 | hsa-miR-593 | | | | | | | | | | | | | |

TABLE 1-2

| sequence | | orthologus sequence number | | | | | | | | | | | | |
|---|---|---|---|---|---|---|---|---|---|---|---|---|---|---|
| number | human miRNA | mmu | rno | cgr | age | lla | sla | mml | mne | pbi | ggo | ppa | ptr | ppy |
| 51 | hsa-miR-595 | | | | | | | | | | | | | |
| 52 | hsa-miR-604 | | | | | | | | | | | | | |
| 53 | hsa-miR-612 | | | | | | | | | | | | | |
| 54 | hsa-miR-625 | | | | | | | | | | | | | |
| 55 | hsa-miR-634 | | | | | | | | | | | | | |
| 56 | hsa-miR-635 | | | | | | | | | | | | | |
| 57 | hsa-miR-637 | | | | | | | | | | | | | |
| 58 | hsa-miR-647 | | | | | | | | | | | | | |
| 59 | hsa-miR-650 | | | | | | | 3449 | | | | | | |
| | | | | | | | | 536 | | | | | | |
| | | | | | | | | 537 | | | | | | |
| 60 | hsa-miR-654 | | | | | | | 3450 | | | | | | |
| 61 | hsa-miR-658 | | | | | | | | | | | | | |
| 62 | hsa-mir-660 | | | | | | | 538 | | | | | | |
| 63 | hsa-miR-668 | 541 | | | | | | 542 | | | | | | |
| 64 | hsa-miR-675 | 3451 | | | | | | 543 | | | | | | |
| 65 | hsa-miR-765 | | | | | | | 544 | | | | | | |
| 66 | hsa-miR-766 | | | | | | | | | | | | | |
| 67 | hsa-miR-194 | 545 | 546 | | 547 | | | 548 | 549 | | 550 | | 551 | 552 |
| 68 | hsa-miR-500 | | | | | | | | | | | | | |
| 69 | hsa-miR-197 | 560 | | | 561 | | | 562 | 563 | | | 564 | 565 | 566 |
| 70 | hsa-miR-221 | 568 | 569 | | | | | 570 | | | 571 | 572 | | 573 |
| 71 | hsa-let-7e | 582 | 589 | | | | | 596 | | | | | | |
| | | 583 | 590 | | | | | 597 | | | | | | |
| | | 584 | 591 | | | | | 598 | | | | | | |
| | | 585 | 592 | | | | | 599 | | | | | | |
| | | 586 | 593 | | | | | 600 | | | | | | |
| | | 587 | 594 | | | | | 601 | | | | | | |
| | | 3453 | 595 | | | | | 602 | | | | | | |
| | | 588 | | | | | | 603 | | | | | | |
| 72 | hsa-miR-1 | 669 | 670 | | | | | 671 | | | | 672 | | |
| 73 | hsa-miR-206 | 681 | 682 | | | | | 683 | 684 | | | | | 685 |
| 74 | hsa-miR-613 | | | | | | | | | | | | | |
| 75 | hsa-miR-9 | 691 | 692 | | 693 | 694 | | 695 | 696 | | 697 | | 698 | |
| 76 | hsa-miR-23b | 3458 | 708 | | 710 | | 711 | 712 | 714 | | 715 | 716 | 718 | 720 |
| | | 707 | 709 | | | | | 713 | | | | 717 | 719 | 721 |
| 77 | hsa-miR-27b | 3459 | 740 | | 742 | | 743 | 744 | 746 | | 747 | 748 | 749 | 750 |
| | | 739 | 741 | | | | | 745 | | | | | | |
| 78 | hsa-miR-28 | 774 | 775 | | 776 | 777 | 778 | 779 | 780 | | 781 | 782 | 783 | 784 |
| 79 | hsa-miR-31 | | | | | | | 786 | 787 | | 788 | 789 | 790 | 791 |
| 80 | hsa-miR-33b | 3461 | 793 | | | | | 794 | 796 | | 797 | 798 | 799 | 800 |
| | | | | | | | | 795 | | | | | | |
| 81 | hsa-miR-96 | 805 | 806 | | | | 807 | 808 | 809 | | 810 | 811 | 812 | |
| 82 | hsa-miR-100 | 818 | 819 | | 820 | 821 | 822 | 823 | | | 824 | 825 | 826 | 827 |
| 83 | hsa-miR-106a | 834 | 835 | | 836 | 838 | 839 | 841 | 843 | | 845 | 847 | 849 | 851 |
| | | 3462 | | | 837 | | 840 | 842 | 844 | | 846 | 848 | 850 | 852 |
| 84 | hsa-miR-126* | 3463 | 858 | | | | | | | | | | | |
| 85 | hsa-miR-127 | 863 | 864 | | 865 | 866 | 867 | 868 | 869 | | | | 870 | 871 |
| 86 | hsa-miR-128b | 3465 | 874 | | 875 | | 876 | 877 | | | | 879 | 880 | 881 |
| | | | | | | | | 878 | | | | | | |
| 87 | hsa-miR-129 | 3466 | 891 | | | | | 3467 | | | | | | |
| 88 | hsa-miR-133a | | | | 898 | 899 | 900 | | 901 | | 902 | 903 | 904 | |
| 89 | hsa-miR-133b | | | | | | | | | | | | | |
| 90 | hsa-miR-135b | 3469 | 914 | | 916 | 917 | | 918 | | | 920 | 921 | 922 | 923 |
| | | 913 | 915 | | | | | 919 | | | | | | |
| 91 | hsa-miR-136 | 936 | 937 | | | | | 938 | | | 939 | 940 | 941 | 942 |
| 92 | hsa-miR-142-5p | 946 | 947 | | | | | 948 | | | | | | |
| 93 | hsa-miR-146a | 955 | 956 | | | | | 957 | | | | | | |
| | | 961 | 962 | | | | | 3472 | | | | | | |
| 94 | hsa-miR-146b | | | | | | | | | | | | | |
| 95 | hsa-miR-181a | 967 | 970 | | | 974 | 976 | 977 | 981 | | 983 | 986 | 989 | 992 |
| | | 3474 | 971 | | | 975 | | 978 | 982 | | 984 | 987 | 990 | 993 |
| | | 968 | 972 | | | | | 979 | | | 985 | 988 | 991 | |
| | | 969 | 973 | | | | | 980 | | | | | | |
| 96 | hsa-miR-182* | | | | | | | | | | | | | |
| 97 | hsa-miR-183 | 1019 | 1020 | | | | 1021 | 1022 | 1023 | | 1024 | 1025 | 1026 | |
| 98 | hsa-miR-187 | 1035 | 1036 | | | | | 1037 | 1038 | | 1039 | 1040 | | 1041 |
| 99 | hsa-miR-192 | 1048 | 1049 | | | | | 1050 | | | | | | |
| 100 | hsa-miR-215 | 1057 | 1058 | | | | | 1059 | 1060 | | 1061 | | 1062 | 1063 |

TABLE 1-3

| sequence | | orthologus sequence number | | | | | | | | | | | | |
|---|---|---|---|---|---|---|---|---|---|---|---|---|---|---|
| number | human miRNA | mmu | rno | cgr | age | lla | sla | mml | mne | pbi | ggo | ppa | ptr | ppy |
| 101 | hsa-miR-200a* | 1067 | | | | | | | | | | | | |
| | | 3477 | | | | | | | | | | | | |
| 102 | hsa-miR-216 | 3478 | 1069 | | | | | 1070 | | | 1071 | 1072 | | 1073 |
| 103 | hsa-miR-217 | 1082 | 1083 | | | | | | | | 1084 | 1085 | | |
| 104 | hsa-miR-220 | | | | | | | | | | 1093 | 1094 | 1095 | |
| 105 | hsa-miR-222 | 1096 | 1097 | | 1098 | | | 1099 | | | | | | |
| 106 | hsa-miR-223 | 1106 | 1107 | | | | 1108 | 1109 | | | 1110 | 1111 | 1112 | 1113 |
| 107 | hsa-miR-224 | 1120 | 1121 | | | | | 1122 | 1123 | | 1124 | 1125 | 1126 | 1127 |
| 108 | hsa-miR-296 | 3480 | 3481 | | | | | 3482 | | | | | | |
| 109 | hsa-miR-302b* | 1130 | | | | | | | | | | | | |
| | | 3483 | | | | | | | | | | | | |
| 110 | hsa-miR-302c* | | | | | | | | | | | | | |
| 111 | hsa-miR-362 | 3484 | | | | | | 3485 | | | | | | |
| 112 | hsa-miR-373* | | | | | | | | | | | | | |
| 113 | hsa-miR-374 | 1133 | 1134 | | | | | 1135 | | | | | | |
| | | | | | | | | 1136 | | | | | | |
| 114 | hsa-miR-376a | 3487 | 1139 | | | | | 1140 | | | | | | |
| | | | | | | | | 1141 | | | | | | |
| 115 | hsa-miR-378 | 3488 | 3489 | | | | | | | | | | | |
| 116 | hsa-miR-409-3p | | | | | | | | | | | | | |
| 117 | hsa-miR-409-5p | 1143 | 1144 | | | | | 1145 | | | | | | |
| 118 | hsa-miR-429 | 1146 | 1147 | | | | | 1148 | | | | | | |
| 119 | hsa-miR-200c | 3490 | 1157 | | | | | | | | | | | |
| | | 1156 | 1158 | | | | | | | | | | | |
| 120 | hsa-miR-432* | | | | | | | | | | | | | |
| 121 | hsa-miR-448 | 1170 | 1171 | | | | | 1172 | | | | | | |
| 122 | hsa-miR-450 | | 3491 | | | | | | | | | | | |
| 123 | hsa-miR-451 | 1175 | 1176 | | | | | 1177 | | | | | | |
| 124 | hsa-miR-452 | 1182 | | | | | | | | | | | | |
| 125 | hsa-miR-487b | 1183 | 1184 | | | | | 1185 | | | | | | |
| 126 | hsa-miR-489 | | | | | | | | | | | | | |
| 127 | hsa-miR-514 | | | | 1192 | | | 1193 | | 1194 | | | 1195 | |
| 128 | hsa-miR-517c | | | | | | | 3493 | | | | | | |
| 129 | hsa-miR-518c | | | | | | | 3494 | | | | | | |
| | | | | | | | | 1197 | | | | | | |
| | | | | | | | | 1198 | | | | | | |
| 130 | hsa-miR-524* | | | | | | | | | | | | | |
| 131 | hsa-miR-542-3p | 1199 | 1200 | | | | | 1201 | | | | | | |
| 132 | hsa-miR-544 | 1202 | | | | | | 1203 | | | | | | |
| 133 | hsa-miR-545 | | | | | | | | | | | | | |
| 134 | hsa-miR-550 | | | | | | | | | | | | | |
| 135 | hsa-miR-552 | | | | | | | | | | | | | |
| 136 | hsa-miR-596 | | | | | | | | | | | | | |
| 137 | hsa-miR-601 | | | | | | | 1204 | | | | | | |
| 138 | hsa-miR-608 | | | | | | | | | | | | | |
| 139 | hsa-miR-609 | | | | | | | 1205 | | | | | | |
| 140 | hsa-miR-617 | | | | | | | | | | | | | |
| 141 | hsa-miR-627 | | | | | | | | | | | | | |
| 142 | hsa-miR-632 | | | | | | | 1206 | | | | | | |
| 143 | hsa-miR-644 | | | | | | | 1207 | | | | | | |
| 144 | hsa-miR-659 | | | | | | | | | | | | | |
| 145 | hsa-miR-769-5p | | | | | | | | | | | | | |
| 146 | hsa-miR-801 | | | | | | | | | | | | | |
| 147 | hsa-miR-365 | 1208 | 1209 | | | | | 1210 | | | | | | |
| 148 | hsa-miR-142-3p | 1219 | 1220 | | | | | 1221 | | | | | | |
| 149 | hsa-miR-200a | 1224 | 1225 | | | | | 1226 | | | | | | |
| 150 | hsa-miR-361 | 1234 | 1235 | | | | | 3498 | | | | | | |

TABLE 1-4

| sequence | | orthologus sequence number | | | | | | | | | | | | |
|---|---|---|---|---|---|---|---|---|---|---|---|---|---|---|
| number | human miRNA | mmu | rno | cgr | age | lla | sla | mml | mne | pbi | ggo | ppa | ptr | ppy |
| 3372 | hsa-miR-29a | 3499 | 3502 | | 3505 | 3506 | 3507 | 3508 | 3510 | | 3511 | 3512 | 3513 | 3514 |
| | | 3500 | 3503 | | | | | 3509 | | | | | | |
| | | 3501 | 3504 | | | | | | | | | | | |
| 3373 | hsa-miR-26b | | | | | | | | | | | | | |
| 3374 | hsa-miR-30a-5p | 3537 | 3542 | | 3547 | 3548 | | 3550 | 3555 | | 3558 | 3561 | 3564 | 3568 |
| | | 3538 | 3543 | | | 3549 | | 3551 | 3556 | | 3559 | 3562 | 3565 | |
| | | 3539 | 3544 | | | | | 3552 | 3557 | | 3560 | 3563 | 3566 | |
| | | 3540 | 3545 | | | | | 3553 | | | | | 3567 | |
| | | 3541 | 3546 | | | | | 3554 | | | | | | |
| 3375 | hsa-miR-30b | | | | | | | | | | | | | |
| 3376 | hsa-miR-105 | | | | | 3601 | 3602 | 3603 | 3604 | | 3605 | 3606 | 3607 | 3608 |
| 3377 | hsa-miR-124a | | | | 3611 | 3612 | | 3613 | | | 3614 | 3615 | 3616 | 3617 |
| 3378 | hsa-miR-128a | 3465 | 874 | | 875 | | 876 | 877 | | | | 879 | 880 | 881 |
| | | | | | | | | 878 | | | | | | |
| 3379 | hsa-miR-150 | 3624 | | | | | | | | | | | | |
| 3380 | hsa-miR-154 | 3631 | | | | | | | | | | | | |
| 3381 | hsa-miR-299-3p | 3639 | | | | | | | | | | | | |
| 3382 | hsa-miR-380-5p | | | | | | | | | | | | | |
| 3383 | hsa-miR-383 | 3642 | 3643 | | | | | 3644 | | | | | | |
| 3384 | hsa-miR-411 | 3649 | 3650 | | | | | 3651 | | | | | | |
| 3385 | hsa-miR-423 | 3652 | 3653 | | | | | 3654 | | | | | | |
| 3386 | hsa-miR-433 | 3655 | 3656 | | | | | 3657 | | | | | | |
| 3387 | hsa-miR-454-3p | | | | | | | 3659 | | | | | | |
| 3388 | hsa-miR-501 | 3662 | 3663 | | | | | 3664 | | | | | | |
| 3389 | hsa-miR-504 | 3665 | | | | | | 3666 | | | | | | |
| 3390 | hsa-miR-506 | | | | | | | 3667 | | 3668 | | | 3669 | |
| 3391 | hsa-miR-507 | | | | | | | 3671 | | 3672 | | | 3673 | |
| 3392 | hsa-miR-508 | | | | | | | | | | | | 3675 | |
| 3393 | hsa-miR-511 | | | | | | | | | | | | | |
| 3394 | hsa-miR-512-3p | | | | | | | 3677 | | | | | | |
| 3395 | hsa-miR-527 | | | | | | | | | | | | | |
| 3396 | hsa-miR-562 | | | | | | | 3678 | | | | | | |
| 3397 | hsa-miR-567 | | | | | | | | | | | | | |
| 3398 | hsa-miR-589 | | | | | | | | | | | | | |
| 3399 | hsa-miR-597 | | | | | | | 3679 | | | | | | |
| 3400 | hsa-miR-605 | | | | | | | 3680 | | | | | | |
| 3401 | hsa-miR-619 | | | | | | | | | | | | | |
| 3402 | hsa-miR-629 | | | | | | | | | | | | | |
| 3403 | hsa-miR-640 | | | | | | | 3681 | | | | | | |
| 3404 | hsa-miR-767-5p | | | | | | | 3682 | | | | | | |
| 3405 | hsa-miR-770-5p | | | | | | | 3683 | | | | | | |
| 3406 | hsa-miR-802 | | | | | | | 3684 | | | | | | |

TABLE 1-5

| sequence | | orthologus sequence number | | | | | | | | | | | | |
|---|---|---|---|---|---|---|---|---|---|---|---|---|---|---|
| number | human miRNA | ssy | lca | cfa | mdo | gga | xla | xtr | bta | oar | ssc | dre | fru | tnl |
| 1 | hsa-miR-16 | | 162 | 163 | 164 | 165 | | 166 | 168 | | | 169 | 172 | 173 |
| | | | | | | | | 167 | | | | 170 | | |
| | | | | | | | | 3407 | | | | 171 | | |
| 2 | hsa-miR-195 | | | 179 | | | | | 180 | | | | | |
| 3 | hsa-miR-17-3p | | 191 | 3409 | 192 | 193 | | 194 | 195 | | | 3410 | | |
| 4 | hsa-miR-18a | | 207 | | 208 | 209 | 3411 | 210 | 211 | | 212 | 213 | 215 | 216 |
| | | | | | | 219 | | 220 | 221 | | | 222 | | |
| | | | | | | | | | | | | 214 | | |
| 5 | hsa-miR-18b | | | | | | | | | | | | | |
| 6 | hsa-miR-20b | | 235 | 236 | 237 | 238 | 240 | 241 | 243 | | 245 | 246 | 248 | 249 |
| | | | | | | 239 | | 242 | 244 | | | 247 | | |
| 7 | hsa-miR-21 | | | 260 | 261 | 262 | | | 263 | | 264 | 265 | 266 | 267 |
| 8 | hsa-miR-24 | | | 276 | 277 | 278 | | 3414 | 280 | | 281 | 282 | 283 | 284 |
| | | | | | | | | 279 | | | | | | |
| 9 | hsa-miR-25 | | | 294 | 295 | | | 296 | 297 | | | 298 | 299 | 300 |
| 10 | hsa-miR-32 | | | 310 | 311 | 312 | | | | | 313 | | | |
| 11 | hsa-miR-26b | | | 325 | | 327 | | 328 | 329 | | 331 | 332 | 334 | 335 |
| | | | | 326 | | | | | 330 | | | 333 | | |
| 12 | hsa-miR-30a-3p | | | 343 | | 344 | | 345 | | | | 346 | | |
| 13 | hsa-miR-34a | | | 361 | 363 | 364 | | 366 | 367 | | | 370 | | |
| | | | | 362 | | 365 | | | 368 | | | 371 | | |
| | | | | | | | | | 369 | | | | | |
| 14 | hsa-miR-449 | | | 376 | 377 | 378 | | 379 | | | | | | |
| 15 | hsa-miR-449b | | | | | | | | | | | | | |
| 16 | hsa-miR-107 | | | 291 | 392 | 393 | | 394 | 395 | | 396 | 397 | 398 | 399 |
| 17 | hsa-miR-140 | | | | | 401 | | 402 | | | 403 | | | |
| 18 | hsa-miR-148b | | | 407 | | 409 | | 410 | 412 | | 414 | 415 | 416 | 417 |
| | | | | 408 | | | | 411 | 413 | | | | | |
| 19 | hsa-miR-190 | | | | | 426 | | | | | | 427 | 429 | 430 |
| | | | | | | | | | | | | 428 | | |
| 20 | hsa-miR-199a | | | | 443 | 3427 | | 439 | 3428 | | | 440 | 441 | 442 |
| | | | | | | | | 444 | 445 | | | | | |
| 21 | hsa-miR-199b | | | | | | | | | | | | | |
| 22 | hsa-miR-202* | | | | | 446 | | 447 | | | | | | |
| 23 | hsa-miR-208 | | | | 452 | | | 453 | | | | | | |
| 24 | hsa-miR-210 | | | | | | | 457 | | | | 458 | 459 | 460 |
| 25 | hsa-miR-211 | | | | | 466 | | | | | | | | |
| 26 | hsa-miR-214 | | | | 477 | | | 478 | 479 | | 480 | 481 | 482 | 483 |
| 27 | hsa-miR-218 | | 495 | 496 | 497 | 498 | | 499 | 500 | | | 3430 | 502 | 504 |
| | | | | | | | | | | | | 501 | 503 | 505 |
| 28 | hsa-miR-299-5p | | | | | | | | | | | | | |
| 29 | hsa-miR-325 | | | | | | | | | | 508 | | | |
| 30 | hsa-miR-328 | | | 511 | | | | | | | | | | |
| 31 | hsa-miR-329 | | | | | | | | | | | | | |
| 32 | hsa-miR-338 | | | 516 | 517 | | | 518 | | | | 519 | 520 | 521 |
| 33 | hsa-miR-345 | | | | | | | | | | | | | |
| 34 | hsa-miR-425-5p | | | 3440 | | | | 522 | | | | | | |
| 35 | hsa-miR-484 | | | | | | | | 526 | | | | | |
| 36 | hsa-miR-485-5p | | | 3443 | | | | | | | | | | |
| 37 | hsa-miR-486 | | | | | | | | | | | | | |
| 38 | hsa-miR-488 | | | | | | | | | | | | | |
| 39 | hsa-miR-510 | | | | | | | | | | | | | |
| 40 | hsa-miR-515-3p | | | | | | | | | | | | | |
| 41 | hsa-miR-515-5p | | | | | | | | | | | | | |
| 42 | hsa-miR-517* | | | | | | | | | | | | | |
| 43 | hsa-miR-520d | | | | | | | | | | | | | |
| 44 | hsa-miR-520f | | | | | | | | | | | | | |
| 45 | hsa-miR-520h | | | | | | | | | | | | | |
| 46 | hsa-miR-522 | | | | | | | | | | | | | |
| 47 | hsa-miR-525* | | | | | | | | | | | | | |
| 48 | hsa-miR-573 | | | | | | | | | | | | | |
| 49 | hsa-miR-587 | | | | | | | | | | | | | |
| 50 | hsa-miR-593 | | | | | | | | | | | | | |

TABLE 1-6

| sequence | | orthologus sequence number | | | | | | | | | | | | |
|---|---|---|---|---|---|---|---|---|---|---|---|---|---|---|
| number | human miRNA | ssy | lca | cfa | mdo | gga | xla | xtr | bta | oar | ssc | dre | fru | tri |
| 51 | hsa-miR-595 | | | | | | | | | | | | | |
| 52 | hsa-miR-604 | | | | | | | | | | | | | |
| 53 | hsa-miR-612 | | | | | | | | | | | | | |
| 54 | hsa-miR-625 | | | | | | | | | | | | | |
| 55 | hsa-miR-634 | | | | | | | | | | | | | |
| 56 | hsa-miR-635 | | | | | | | | | | | | | |
| 57 | hsa-miR-637 | | | | | | | | | | | | | |
| 58 | hsa-miR-647 | | | | | | | | | | | | | |
| 59 | hsa-miR-650 | | | | | | | | | | | | | |
| 60 | hsa-miR-654 | | | | | | | | | | | | | |
| 61 | hsa-miR-658 | | | | | | | | | | | | | |
| 62 | hsa-miR-660 | | | 539 | | | | | 540 | | | | | |
| 63 | hsa-miR-668 | | | | | | | | | | | | | |
| 64 | hsa-miR-675 | | | | | | | | | | | | | |
| 65 | hsa-miR-765 | | | | | | | | | | | | | |
| 66 | hsa-miR-766 | | | | | | | | | | | | | |
| 67 | hsa-miR-194 | | | 553 | | 554 | | 555 | | | | 3452 | 557 | 558 |
| | | | | | | | | | | | | 556 | | |
| 68 | hsa-miR-500 | | | 559 | | | | | | | | | | |
| 69 | hsa-miR-197 | | | 567 | | | | | | | | | | |
| 70 | hsa-miR-221 | | | 574 | 575 | 576 | | 577 | 578 | | | 579 | 580 | 281 |
| 71 | hsa-let-7e | | | 604 | 610 | 616 | | 625 | 632 | | 640 | 643 | 653 | 661 |
| | | | | 605 | 611 | 617 | | 626 | 633 | | 641 | 644 | 654 | 662 |
| | | | | 606 | 612 | 618 | | 627 | 634 | | 642 | 645 | 655 | 663 |
| | | | | 607 | 613 | 619 | | 628 | 635 | | | 646 | 656 | 664 |
| | | | | 608 | 614 | 620 | | 629 | 636 | | | 647 | 657 | 665 |
| | | | | 609 | 615 | 621 | | 630 | 637 | | | 648 | 658 | 666 |
| | | | | | | 622 | | 631 | 638 | | | 649 | 659 | 667 |
| | | | | | | 623 | | | 639 | | | 650 | 660 | 668 |
| | | | | | | 624 | | | | | | 651 | | |
| | | | | | | | | | | | | 652 | | |
| 72 | hsa-miR-1 | | | 673 | 674 | 675 | | 3454 | | | | 678 | 679 | 680 |
| | | | | | | 676 | | 677 | | | | | | |
| 73 | hsa-miR-206 | | | | | | | | | | | 690 | | |
| 74 | hsa-miR-613 | | | | | | | | | | | | | |
| 75 | hsa-miR-9 | | | 699 | 700 | 701 | | 702 | | | 3456 | 704 | 705 | 706 |
| | | | | | | | | 3455 | | | 3457 | | | |
| | | | | | | | | 703 | | | | | | |
| 76 | hsa-miR-23b | | 722 | 723 | 725 | 727 | | 728 | 730 | | 732 | 733 | 735 | 737 |
| | | | | 724 | 726 | | | 729 | 731 | | | 734 | 736 | 738 |
| 77 | hsa-miR-27b | | 751 | 752 | 754 | 756 | | 757 | 760 | | 762 | 763 | 768 | 771 |
| | | | | 753 | 755 | | | 758 | 761 | | | 764 | 769 | 772 |
| | | | | | | | | 759 | | | | 765 | 770 | 773 |
| | | | | | | | | | | | | 766 | | |
| | | | | | | | | | | | | 767 | | |
| 78 | hsa-miR-28 | | | | | | | | | | 785 | | | |
| 79 | hsa-miR-31 | | | | | | | | | | | 792 | | |
| 80 | hsa-miR-33b | | | 801 | | 802 | | 803 | | | | | | |
| | | | | | | | | 804 | | | | | | |
| 81 | hsa-miR-95 | | | | 813 | | | 814 | | | | 815 | 816 | 817 |
| 82 | hsa-miR-100 | | | | 828 | 829 | | 830 | | | | 831 | 832 | 833 |
| 83 | hsa-miR-106a | | | 853 | | 854 | | 855 | 856 | | 857 | | | |
| 84 | hsa-miR-126* | | | 3464 | | 859 | | 860 | 861 | | | 862 | | |
| 85 | hsa-miR-127 | | | 872 | | | | | 873 | | | | | |
| 86 | hsa-miR-128b | | | 882 | 883 | 884 | | 885 | 886 | | 887 | 888 | 889 | 890 |
| 87 | hsa-miR-129 | | | 892 | 893 | | | 894 | | | | 895 | 896 | 897 |
| 88 | hsa-miR-133a | | | | 905 | 906 | 908 | 909 | | | | | | |
| | | | | | | 911 | | 912 | | | | | | |
| | | | | | | 907 | | 3468 | | | | | | |
| | | | | | | | | 910 | | | | | | |
| 89 | hsa-miR-133b | | | | | | | | | | | | | |
| 90 | hsa-miR-135b | | | | 924 | 926 | | 927 | | | 928 | 929 | 932 | 934 |
| | | | | | 925 | | | | | | | 930 | 933 | 935 |
| | | | | | | | | | | | | 931 | | |
| 91 | hsa-miR-136 | | | | | | | | | 944 | 945 | | | |
| 92 | hsa-miR-142-5p | | | | | | | 949 | 3470 | | | 3471 | 951 | 953 |
| | | | | | | | | | | | | 950 | 952 | 954 |
| 93 | hsa-miR-146a | | | 958 | | 959 | | 3473 | | | | 960 | | |
| | | | | 963 | | 964 | | 965 | | | | 966 | | |
| 94 | hsa-miR-146b | | | | | | | | | | | | | |
| 95 | hsa-miR-181a | | | 994 | 998 | 1001 | | 1003 | 1005 | | 1008 | 1010 | 1013 | 1015 |
| | | | | 995 | 999 | 1002 | | 1004 | 1006 | | 1009 | 1011 | 1014 | 1016 |
| | | | | 996 | 1000 | | | | 1007 | | | 1012 | | |
| | | | | 997 | | | | | | | | | | |
| 96 | hsa-miR-182* | | | | | | | 1017 | | | | 1018 | 3475 | 3476 |
| 97 | hsa-miR-183 | | | 1027 | 1028 | 1029 | | 1030 | | | 1031 | 1032 | 1033 | 1034 |
| 98 | hsa-miR-187 | | | | 1042 | 1042 | | 1044 | | | | 1045 | 1046 | 1047 |
| 99 | hsa-miR-192 | | | 1051 | | | | 1052 | 1053 | | | 1054 | 1055 | 1056 |
| 100 | hsa-miR-215 | | | | | 1064 | | 1065 | 1066 | | | | | |

TABLE 1-7

| sequence | | orthologus sequence number | | | | | | | | | | | | |
|---|---|---|---|---|---|---|---|---|---|---|---|---|---|---|
| number | human miRNA | ssy | lca | cfa | mdo | gga | xla | xtr | bta | oar | ssc | dre | fru | tni |
| 101 | hsa-miR-200a* | | | | 1068 | | | | | | | | | |
| 102 | hsa-miR-216 | | 1074 | | 1075 | 1076 | | 1077 | | | 1078 | 1079 | 1080 | 1081 |
| 103 | hsa-miR-217 | | | | 1086 | 1087 | | 1088 | | | 1089 | 1090 | 1091 | 1092 |
| 104 | hsa-miR-220 | | | | | | | | | | | | | |
| 105 | hsa-miR-222 | | | | 3479 | 1100 | | 1101 | 1102 | | | 1103 | 1104 | 1105 |
| 106 | hsa-miR-223 | | | | 1114 | 1115 | | 1116 | | | | 1117 | 1118 | 1119 |
| 107 | hsa-miR-224 | | | 1128 | | | | | | | 1129 | | | |
| 108 | hsa-miR-296 | | | | | | | | | | | | | |
| 109 | hsa-miR-302b* | | | | | 1131 | | | | | | | | |
| 110 | hsa-miR-302c* | | | | | 1132 | | | | | | | | |
| 111 | hsa-miR-362 | | | | | | | | | | | | | |
| 112 | hsa-miR-373* | | | | | | | | | | | | | |
| 113 | hsa-miR-374 | | | 3486 | | | | | 1138 | | | | | |
| | | | | 1137 | | | | | | | | | | |
| 114 | hsa-miR-376a | | | 1142 | | | | | | | | | | |
| 115 | hsa-miR-378 | | | | | | | | | | | | | |
| 116 | hsa-miR-409-3p | | | | | | | | | | | | | |
| 117 | hsa-miR-409-5p | | | | | | | | | | | | | |
| 118 | hsa-miR-429 | | | 1149 | | 1150 | 1151 | 1152 | | | | 1153 | 1154 | 1155 |
| 119 | hsa-miR-200c | | | 1159 | 1160 | 1162 | | 1163 | 1164 | | | 1166 | 1168 | 1169 |
| | | | | | 1161 | | | | 1165 | | | 1167 | | |
| 120 | hsa-miR-432* | | | | | | | | | | | | | |
| 121 | hsa-miR-448 | | | 1173 | | | | | | | | | | |
| 122 | hsa-miR-450 | | | 1174 | | | | | | | | | | |
| 123 | hsa-miR-451 | | | | 1178 | 1179 | | 1180 | | | | 1181 | | |
| 124 | hsa-miR-452 | | | | | | | | | | | | | |
| 125 | hsa-miR-487b | | | 3492 | | | | | 1186 | | | | | |
| 126 | hsa-miR-489 | | | | | 1187 | | 1188 | | | | 1189 | 1190 | 1191 |
| 127 | hsa-miR-514 | 1196 | | | | | | | | | | | | |
| 128 | hsa-miR-517c | | | | | | | | | | | | | |
| 129 | hsa-miR-518c | | | | | | | | | | | | | |
| 130 | hsa-miR-524* | | | | | | | | | | | | | |
| 131 | hsa-miR-542-3p | | | 3495 | | | | | | | | | | |
| 132 | hsa-miR-544 | | | | | | | | | | | | | |
| 133 | hsa-miR-545 | | | | | | | | | | | | | |
| 134 | hsa-miR-550 | | | | | | | | | | | | | |
| 135 | hsa-miR-552 | | | | | | | | | | | | | |
| 136 | hsa-miR-596 | | | | | | | | | | | | | |
| 137 | hsa-miR-601 | | | | | | | | | | | | | |
| 138 | hsa-miR-608 | | | | | | | | | | | | | |
| 139 | hsa-miR-609 | | | | | | | | | | | | | |
| 140 | hsa-miR-617 | | | | | | | | | | | | | |
| 141 | hsa-miR-627 | | | | | | | | | | | | | |
| 142 | hsa-miR-632 | | | | | | | | | | | | | |
| 143 | hsa-miR-644 | | | | | | | | | | | | | |
| 144 | hsa-miR-659 | | | | | | | | | | | | | |
| 145 | hsa-miR-769-5p | | | | | | | | | | | | | |
| 146 | hsa-miR-801 | | | | | | | | | | | | | |
| 147 | hsa-miR-365 | | | 1211 | 1212 | 1213 | | 1214 | 1215 | | | 1216 | 1217 | 1218 |
| 148 | hsa-miR-142-3p | | | | 3496 | 1222 | | 1223 | | | | 3497 | | |
| 149 | hsa-miR-200a | | | | 1227 | 1228 | | 1229 | 1230 | | | 1231 | 1232 | 1233 |
| 150 | hsa-miR-361 | | | 1236 | | | | | 1237 | | | | | |

TABLE 1-8

| sequence | | orthologus sequence number | | | | | | | | | | | | |
|---|---|---|---|---|---|---|---|---|---|---|---|---|---|---|
| number | human miRNA | ssy | lca | cfa | mdo | gga | xla | xtr | bta | oar | ssc | dre | fru | tni |
| 3372 | hsa-miR-29a | | | 3515 | 3518 | 3520 | | 3523 | 3527 | | 3529 | 3531 | 3533 | 3535 |
| | | | | 3516 | 3519 | 3521 | | 3524 | 3528 | | 3530 | 3532 | 3534 | 3536 |
| | | | | 3517 | | 3522 | | 3525 | | | | | | |
| | | | | | | | | 3526 | | | | | | |
| 3373 | hsa-miR-29b | | | | | | | | | | | | | |
| 3374 | hsa-miR-30a-5p | | | 3569 | 3573 | 3574 | | 3579 | 3584 | | 3589 | 3590 | 3595 | 3598 |
| | | | | 3570 | | 3575 | | 3580 | 3585 | | | 3591 | 3596 | 3599 |
| | | | | 3571 | | 3576 | | 3581 | 3586 | | | 3592 | 3597 | 3600 |
| | | | | 3572 | | 3577 | | 3582 | 3587 | | | 3593 | | |
| | | | | | | 3578 | | 3583 | 3588 | | | 3594 | | |
| 3375 | hsa-miR-30b | | | | | | | | | | | | | |
| 3376 | hsa-miR-105 | | | | | | | | | | 3609 | | | |
| | | | | | | | | | | | 3610 | | | |
| 3377 | hsa-miR-124a | | | | 3618 | 3619 | | 3621 | 3622 | | 3623 | | | |
| | | | | | | 3620 | | | | | | | | |
| 3378 | hsa-miR-128a | | | 882 | 883 | 884 | | 885 | 886 | | 887 | 888 | 889 | 890 |
| 3379 | hsa-miR-150 | | | 3627 | | | | 3628 | 3629 | | | 3630 | | |
| 3380 | hsa-miR-154 | | | | | | | | | | | | | |
| 3381 | hsa-miR-299-3p | | | | | | | | | | | | | |
| 3382 | hsa-miR-380-5p | | | | | | | | 3641 | | | | | |
| 3383 | hsa-miR-383 | | | 3645 | 3646 | 3647 | | 3648 | | | | | | |
| 3384 | hsa-miR-411 | | | | | | | | | | | | | |
| 3385 | hsa-miR-423 | | | | | | | | | | | | | |
| 3386 | hsa-miR-433 | | | 3658 | | | | | | | | | | |
| 3387 | hsa-miR-454-3p | | | | | | | | | | | 3660 | | |
| | | | | | | | | | | | | 3661 | | |
| 3388 | hsa-miR-501 | | | | | | | | | | | | | |
| 3389 | hsa-miR-504 | | | | | | | | | | | | | |
| 3390 | hsa-miR-506 | 3670 | | | | | | | | | | | | |
| 3391 | hsa-miR-507 | 3674 | | | | | | | | | | | | |
| 3392 | hsa-miR-508 | 3676 | | | | | | | | | | | | |
| 3393 | hsa-miR-511 | | | | | | | | | | | | | |
| 3394 | hsa-miR-512-3p | | | | | | | | | | | | | |
| 3395 | hsa-miR-537 | | | | | | | | | | | | | |
| 3396 | hsa-miR-562 | | | | | | | | | | | | | |
| 3397 | hsa-miR-567 | | | | | | | | | | | | | |
| 3398 | hsa-miR-589 | | | | | | | | | | | | | |
| 3399 | hsa-miR-597 | | | | | | | | | | | | | |
| 3400 | hsa-miR-605 | | | | | | | | | | | | | |
| 3401 | hsa-miR-619 | | | | | | | | | | | | | |
| 3402 | hsa-miR-629 | | | | | | | | | | | | | |
| 3403 | hsa-miR-640 | | | | | | | | | | | | | |
| 3404 | hsa-miR-767-5p | | | | | | | | | | | | | |
| 3405 | hsa-miR-770-5p | | | | | | | | | | | | | |
| 3406 | hsa-miR-802 | | | | | | | | | | | | | |

[0040] Regarding the mechanism in which a micro-RNA suppresses the translation of the mRNA of a target gene therefor, it is known that an mRNA having a nucleotide sequence complementary to the 2nd to 8th nucleotides from the 5′-end of the micro-RNA is recognized as a micro-RNA target gene (Current Biology, 15, R458-R460 (2005)). By this mechanism, the expression of the mRNA is suppressed by the micro-RNA. Therefore, micro-RNAs having the same nucleotide sequence at the 2nd to 8th nucleotides from the 5′-end suppress the expression of the mRNA of the same target gene to exhibit the same function. As micro-RNAs having the same nucleotide sequence at the 2nd to 8th nucleotides from the 5′-end as the nucleotide sequence of a micro-RNA consisting of a nucleotide sequence of any one of SEQ ID NOs:1 to 150 and 3372 to 3406, nucleic acids consisting of a nucleotide sequence of any one of SEQ ID NOs:1238 to 1543 and 3685 to 3741 can be mentioned. As specific examples of the micro-RNAs, for the micro-RNA of SEQ ID NO:1, micro-RNAs consisting of a nucleotide sequence of any one of SEQ ID NOs:1238 to 1286 can be mentioned. Tables of the correspondence of micro-RNAs having the same nucleotide sequence at the 2nd to 8th nucleotides from the 5′-end as the nucleotide sequence of a micro-RNA consisting of a nucleotide sequence of any one of SEQ ID NOs:1 to 150 and 3372 to 3406 are shown in Table 2-1 to Table 2-8. Because micro-RNAs having a common seed sequence are considered to share the same target nucleotide sequence, they are considered to possess similar functions.

TABLE 2-1

| | | sequence of | | | | | | | | | | | | | |
|---|---|---|---|---|---|---|---|---|---|---|---|---|---|---|---|
| | | 2nd to 8th | sequence number of mRNA having sequence with the same 2nd | | | | | | | | | | | | |
| sequence | | on 5′terminal | to 8th nucleotides on 5′terminal side | | | | | | | | | | | | |
| number | human miRNA | side | hsa | mmu | rno | cgr | age | lla | sla | mml | mne | pbi | ggo | ppa | ptr |
| 1 | hsa-miR-16 | AGCAGCA | 1238 | 1242 | 1246 | | 1249 | 1251 | 1253 | 1254 | 1258 | | 1260 | 1262 | 1264 |
| 2 | hsa-miR-195 | | 1239 | 1243 | 1247 | | 1250 | 1252 | | 1255 | 1259 | | 1261 | 1263 | 1265 |
| | | | 1240 | 1244 | 1248 | | | | | 1256 | | | | | |
| | | | 1241 | 1245 | | | | | | 1257 | | | | | |
| 3 | hsa-miR-17-3p | CUGCAGU | | 1287 | 1288 | | | | | | | | | | |
| 4 | hsa-miR-18a | AAGGUCC | | | | | | | | | | | | | |
| 5 | hsa-miR-18b | | | | | | | | | | | | | | |
| 6 | hsa-miR-20b | AAAGUGC | | | | | | | | | | | | | |
| 7 | hsa-miR-21 | AGCUUAU | 1290 | 1291 | | | | | | 1292 | | | | | |
| 8 | hsa-miR-24 | GGCUCAG | | | | | | | | | | | | | |
| 9 | hsa-miR-25 | AUUGCAC | 1293 | 1297 | 1301 | | 1304 | 1305 | 1306 | 1307 | | | | | |
| 10 | hsa-miR-32 | | 1294 | 1298 | 1302 | | | | | 1308 | | | | | |
| | | | 1295 | 1299 | 1303 | | | | | 1309 | | | | | |
| | | | 1296 | 1300 | | | | | | 1310 | 1311 | | 1312 | 1313 | 1314 |
| 11 | hsa-miR-26b | UCAAGUA | 1333 | | | | | | | | | | | | |
| | | | 1334 | | | | | | | | | | | | |
| 12 | hsa-miR-30a-3p | UUUCAGU | 1335 | | | | | | | | | | | | |
| | | | 1336 | | | | | | | | | | | | |
| 13 | hsa-miR-34a | GGCAGUG | 1337 | 1338 | | | | | | | | | | | |
| 14 | hsa-miR-449 | | | | | | | | | | | | | | |
| 15 | hsa-miR-449b | | | | | | | | | | | | | | |
| 16 | hsa-miR-107 | GCAGCAU | 1339 | 1340 | 1341 | | 1342 | 1343 | | 1344 | 1345 | | 1346 | 1347 | 1348 |
| 17 | hsa-miR-140 | GUGGUUU | | | | | | | | | | | | | |
| 18 | hsa-miR-148b | CAGUGCA | 1359 | 1361 | 1362 | | | | | 1363 | | | | | |
| | | | 1360 | | | | | | | | | | | | |
| 19 | hsa-miR-190 | GAUAUGU | 1369 | | | | | | | | | | | | |
| 20 | hsa-miR-199a | CCAGUGU | | | | | | | | | | | | | |
| 21 | hsa-miR-199b | | | | | | | | | | | | | | |
| 22 | hsa-miR-202* | UUCCUAU | | | | | | | | | | | | | |
| 23 | hsa-miR-208 | UAAGACG | 1370 | | | | | | | | | | | | |
| 24 | hsa-miR-210 | UGUGCGU | | | | | | | | | | | | | |
| 25 | hsa-miR-211 | UCCCUUU | 1372 | 1373 | 1374 | | | | 1375 | 1376 | 1377 | | 1378 | 1379 | 1380 |
| 26 | hsa-miR-214 | CAGCAGG | | 1392 | | | | | | | | | | | |
| 27 | hsa-miR-218 | UGUGCUU | | | | | | | | | | | | | |
| 28 | hsa-miR-299-5p | GGUUUAC | | | | | | | | | | | | | |
| 29 | hse-miR-325 | CUAGUAG | | | | | | | | | | | | | |
| 30 | hsa-miR-328 | UGGCCCU | | | | | | | | | | | | | |
| 31 | hsa-miR-329 | ACACACC | 1393 | 1394 | | | | | | 1395 | | | | | |
| 32 | hsa-mIR-338 | CCAGCAU | | | | | | | | | | | | | |
| 33 | hsa-miR-345 | GCUGACU | | | | | | | | | | | | | |
| 34 | hsa-miR-425-5p | AUGACAC | | 1396 | | | | | | | | | | | |
| 35 | hsa-miR-484 | CAGGCUC | | | 1398 | | | | | | | | | | |
| 36 | hsa-miR-485-5p | GAGGCUG | | | | | | | | | | | | | |
| 37 | hsa-miR-486 | CCUGUAC | | | | | | | | | | | | | |
| 38 | hsa-miR-488 | CCAGAUA | | | | | | | | | | | | | |
| 39 | hsa-miR-510 | ACUCAGG | | | | | | | | | | | | | |
| 40 | hsa-miR-515-3p | AGUGCCU | 1399 | | | | | | | | | | | | |
| | | | 1400 | | | | | | | | | | | | |
| 41 | hsa-miR-515-5p | UCUCCAA | 1401 | | | | | | | | | | | | |
| 42 | hsa-miR-517* | CUCUAGA | | | | | | | | | | | | | |
| 43 | hsa-miR-520d | AAGUGCU | 1402 | 1413 | 1419 | | 1420 | 1421 | 1422 | 1423 | | | | | |
| | | | 1403 | 1414 | | | | | | 1424 | | | | | |
| | | | 1404 | 1415 | | | | | | 1425 | | | | | |
| | | | 1405 | 1416 | | | | | | 1426 | | | | | |
| | | | 1406 | 1417 | | | | | | 1427 | | | | | |
| | | | 1407 | 1418 | | | | | | 1428 | | | | | |
| | | | 1408 | | | | | | | 1429 | | | | | |
| | | | 1409 | | | | | | | 1430 | 1431 | | 1432 | 1433 | 1434 |
| | | | 1410 | | | | | | | | | | | | |
| | | | 1411 | | | | | | | | | | | | |
| | | | 1412 | | | | | | | | | | | | |
| 44 | hsa-miR-520f | AGUGCUU | | 1455 | | | | | | | | | | | |
| 45 | hsa-miR-520h | CAAAGUG | 1457 | | | | | | | | | | | | |
| 46 | hsa-miR-522 | AAAUGGU | | | | | | | | 1458 | | | | | |
| 47 | hsa-miR-525* | AAGGCGC | 1459 | | | | | | | | | | | | |
| 48 | hsa-miR-573 | UGAAGUG | | | | | | | | | | | | | |
| 49 | hsa-miR-587 | UUCCAUA | | | | | | | | | | | | | |
| 50 | hsa-miR-593 | GGCACCA | | | | | | | | | | | | | |

TABLE 2-2

| | | sequence of | | | | | | | | | | | | | |
|---|---|---|---|---|---|---|---|---|---|---|---|---|---|---|---|
| | | 2nd to 8th | sequence number of mRNA having sequence with the same 2nd | | | | | | | | | | | | |
| sequence | | on 5′terminal | to 8th nucleotides on 5′terminal side | | | | | | | | | | | | |
| number | human miRNA | side | hsa | mmu | rno | cgr | age | lla | sla | mml | mne | pbi | ggo | ppa | ptr |
| 51 | hsa-miR-595 | AAGUGUG | | | | | | | | | | | | | |
| 52 | hsa-miR-604 | GGCUGCG | | | | | | | | | | | | | |
| 53 | hsa-miR-612 | CUGGGCA | 1460 | | | | | | | | | | | | |
| 54 | hsa-miR-625 | GGGGGAA | | | | | | | | | | | | | |
| 55 | hsa-miR-634 | ACCAGCA | | | | | | | | | | | | | |
| 56 | hsa-miR-635 | CUUGGGC | | | | | | | | | | | | | |
| 57 | hsa-miR-637 | CUGGGGG | | | | | | | | | | | | | |
| 58 | hsa-miR-647 | UGGCUGC | | | | | | | | | | | | | |
| 59 | hsa-miR-650 | GGAGGCA | | | | | | | | | | | | | |
| 60 | hsa-miR-654 | GGUGGGC | 1461 | | | | | | | | | | | | |
| 61 | hsa-miR-658 | GCGGAGG | | | | | | | | | | | | | |
| 62 | hsa-miR-660 | ACCCAUU | | | | | | | | | | | | | |
| 63 | hsa-miR-668 | GUCACUC | | | | | | | | | | | | | |
| 64 | hsa-miR-675 | GGUGCGG | | | | | | | | | | | | | |
| 65 | hsa-miR-765 | GGAGGAG | | | | | | | | | | | | | |
| 66 | hsa-miR-766 | CUCCAGC | | | | | | | | | | | | | |
| 67 | hsa-miR-194 | GUAACAG | | | | | | | | | | | | | |
| 68 | hsa-miR-500 | UGCACCU | | | | | | | | | | | | | |
| 69 | hsa-miR-197 | UCACCAC | | | | | | | | | | | | | |
| 70 | hsa-miR-221 | GCUACAU | | | | | | | | | | | | | |
| 71 | hsa-let-7e | GAGGUAG | 1462 | 1470 | 1471 | | 1472 | | | 1473 | | | 1474 | 1475 | 1476 |
| | | | 1463 | | | | | | | | | | | | |
| | | | 1464 | | | | | | | | | | | | |
| | | | 1465 | | | | | | | | | | | | |
| | | | 1466 | | | | | | | | | | | | |
| | | | 1467 | | | | | | | | | | | | |
| | | | 1468 | | | | | | | | | | | | |
| | | | 1469 | | | | | | | | | | | | |
| 72 | hsa-miR-1 | GGAAUGU | | | | | | | | | | | | | |
| 73 | hsa-miR-206 | | | | | | | | | | | | | | |
| 74 | hsa-miR-613 | | | | | | | | | | | | | | |
| 75 | hsa-miR-9 | CUUUGGU | | | | | | | | | | | | | |
| 76 | hsa-miR-23b | UCACAUU | 1481 | | | | | | | | | | | | |
| | | | 1482 | | | | | | | | | | | | |
| 77 | hsa-miR-27b | UCACAGU | 1483 | | | | | | | | | | | | |
| 78 | hsa-miR-28 | AGGAGCU | 1484 | 1485 | 1486 | | | | | | | | | | |
| 79 | hsa-miR-31 | GCAAGAU | | | | | | | | | | | | | |
| 80 | hsa-miR-33b | UGCAUUG | 1488 | | | | | | | | | | | | |
| 81 | hsa-miR-96 | UUGGCAC | 1489 | | | | 1490 | | | | | | | | |
| 82 | hsa-miR-100 | ACCCGUA | 1492 | 1494 | 1496 | | | 1498 | | 1499 | | | | | |
| | | | 1993 | 1495 | 1497 | | | | | 1500 | 1501 | | 1502 | 1503 | 1504 |
| 83 | hsa-miR-106a | AAAGUCC | | | | | | | | | | | | | |
| 84 | hsa-miR-126* | AUUAUUA | | | | | | | | | | | | | |
| 85 | hsa-miR-127 | CGGAUCC | | | | | | | | | | | | | |
| 86 | hsa-miR-128b | CACAGUG | 1514 | | | | | | | | | | | | |
| 87 | hsa-miR-129 | UUUUUGC | | | | | | | | | | | | | |
| 88 | hsa-miR-133a | UGGUCCC | | | | | | | | | | | | | |
| 89 | hsa-miR-133b | | | | | | | | | | | | | | |
| 90 | hsa-miR-135b | AUGGCUU | 1516 | | | | | | | | | | | | |
| 91 | hsa-miR-136 | CUCCAUU | | | | | | | | | | | | | |
| 92 | hsa-miR-142-5p | AUAAGU | | | | | | | | | | | | | |
| 93 | hsa-miR-146a | GAGAACU | | | | | | | | | | | | | |
| 94 | hsa-miR-146b | | | | | | | | | | | | | | |
| 95 | hsa-miR-181a | ACAUUCA | 1517 | | | | | | | | | | | | |
| | | | 1518 | | | | | | | | | | | | |
| | | | 1519 | | | | | | | | | | | | |
| 96 | hsa-miR-182* | GGUUCUA | | | | | | | | | | | | | |
| 97 | hsa-miR-183 | AUGGCAC | | | | | | | | | | | | | |
| 98 | hsa-miR-187 | CGUGUCU | | | | | | | | | | | | | |
| 99 | hsa-miR-192 | UGACCUA | | | | | | | | | | | | | |
| 100 | hsa-miR-216 | | | | | | | | | | | | | | |

TABLE 2-3

| | | sequence of | | | | | | | | | | | | | |
|---|---|---|---|---|---|---|---|---|---|---|---|---|---|---|---|
| | | 2nd to 8th | | | | | | | | | | | | | |
| | | on | sequence number of mRNa having sequence with the same | | | | | | | | | | | | |
| sequence | | 5′terminal | 2nd to 8th nucleotides on 5′terminal side | | | | | | | | | | | | |
| number | human miRNA | side | hsa | mmu | rno | cgr | aga | lla | sla | mml | mne | pbi | ggo | ppa | ptr |
| 101 | hsa-miR-200a | AUCUUAC | 1520 | | | | | | | | | | | | |
| 102 | hsa-miR-216 | AAUCUCA | | | | | | | | | | | | | |
| 103 | hsa-miR-217 | ACUGCAU | | | | | | | | | | | | | |
| 104 | hsa-miR-220 | CACACCG | | | | | | | | | | | | | |
| 105 | hsa-miR-222 | GCUACAU | | | | | | | | | | | | | |
| 106 | hsa-miR-223 | GUCAGUU | | | | | | | | | | | | | |
| 107 | hsa-miR-224 | AAGUCAC | | | | | | | | | | | | | |
| 108 | hsa-miR-296 | GGGCCCC | | | | | | | | | | | | | |
| 109 | hsa-miR-302b* | CUUUAAC | 1521 | | | | | | | | | | | | |
| 110 | hsa-miR-302c* | UUAACAU | | | | | | | | | | | | | |
| 111 | hsa-miR-362 | AUCCUUG | | | | | | | | | | | | | |
| 112 | hsa-miR-373* | CUCAAAA | 1522 | 1523 | | | | | | | | | | | |
| 113 | hsa-miR-374 | UAUAAUA | 1524 | | | | | | | | | | | | |
| 114 | hsa-miR-376a | UCAUAGA | 1525 | | | | | | | | | | | | |
| 115 | hsa-miR-378 | UCCUGAC | | | | | | | | | | | | | |
| 116 | hsa-miR-409-3p | GAAUGUU | | | | | | | | | | | | | |
| 117 | hsa-miR-409-5p | GGUUACC | | | | | | | | | | | | | |
| 118 | hsa-miR-429 | AAUACUC | 1526 | | | | | | | 1527 | | | | | |
| 119 | hsa-miR-200c | | | | | | | | | | | | | | |
| 120 | hsa-miR-432* | UGGAUGG | | | | | | | | | | | | | |
| 121 | hsa-miR-448 | UCCAUAU | | | | | | | | | | | | | |
| 122 | hsa-miR-450 | UUUUGCG | | | | | | | | | | | | | |
| 123 | hsa-miR-451 | AACCGUU | | | | | | | | | | | | | |
| 124 | hsa-miR-452 | GUUUGCA | | | | | | | | | | | | | |
| 125 | hsa-miR-487b | AUCGUAC | | | | | | | | | | | | | |
| 126 | hsa-miR-489 | GUGACAU | | | | | | | | | | | | | |
| 127 | hsa-miR-514 | UUGACAC | | | | | | | | | | | | | |
| 128 | hsa-miR-517c | UCGUGCA | 1528 | | | | | | | | | | | | |
| 129 | hsa-miR-518c | AAAGCGC | 1529 | | | | | | | | | | | | |
| | | | 1530 | | | | | | | | | | | | |
| | | | 1531 | | | | | | | | | | | | |
| | | | 1532 | | | | | | | | | | | | |
| 130 | hsa-miR-524* | UACAAAG | 1533 | | | | | | | 1534 | | | | | |
| | | | | | | | | | | 1535 | | | | | |
| 131 | hsa-miR-542-3p | GUGACAG | | | | | | | | | | | | | |
| 132 | hsa-miR-544 | UUCUGCA | | | | | | | | | | | | | |
| 133 | hsa-miR-545 | UCAGCAA | | | | | | | | | | | | | |
| 134 | hsa-miR-550 | GUCUUAC | 1536 | 1537 | | | | | | | | | | | |
| 135 | hsa-miR-552 | ACAGGUG | | | | | | | | | | | | | |
| 136 | hsa-miR-596 | AGCCUGC | | | | | | | | | | | | | |
| 137 | hsa-miR-601 | GGUCUAG | | | | | | | | | | | | | |
| 138 | hsa-miR-608 | GGGGUGG | | | | | | | | | | | | | |
| 139 | hsa-miR-609 | GGGUGUU | | | | | | | | | | | | | |
| 140 | hsa-miR-617 | GACUUCC | | | | | | | | | | | | | |
| 141 | hsa-miR-627 | UGAGUCU | | | | | | | | 1538 | | | | | |
| 142 | hsa-miR-632 | UGUCUGC | | | | | | | | | | | | | |
| 143 | hsa-miR-644 | GUGUGGC | | | | | | | | | | | | | |
| 144 | hsa-miR-659 | UUGGUUC | | | | | | | | | | | | | |
| 145 | hsa-miR-769-5p | GAGACCU | | | | | | | | | | | | | |
| 146 | hsa-miR-801 | AUUGCUC | | | | | | | | | | | | | |
| 147 | hsa-miR-365 | AAUGCCC | | | | | | | | | | | | | |
| 148 | hsa-miR-142-3p | GUAGUGU | | | | | | | | | | | | | |
| 149 | hsa-miR-200a | AACACUG | 1539 | 1540 | 1541 | | | | | | | | | | |
| 150 | hsa-miR-361 | UAUCAGA | | | | | | | | | | | | | |

TABLE 2-4

| | | sequence of | | | | | | | | | | | | | |
|---|---|---|---|---|---|---|---|---|---|---|---|---|---|---|---|
| | | 2nd to 8th | sequence number of mRNA having sequence with the same 2nd | | | | | | | | | | | | |
| sequence | | on 5′terminal | to 8th nucleotides on 5′terminal side | | | | | | | | | | | | |
| number | human miRNA | side | hsa | mmu | rno | cgr | age | lla | sla | mml | mne | pbi | ggo | ppa | ptr |
| 3372 | hsa-miR-29a | AGCACCA | 3685 | | | | | | | | | | | | |
| 3373 | hsa-miR-29b | | | | | | | | | | | | | | |
| 3374 | hsa-miR-30a-5p | GUAAACA | 3686 | 3689 | 3690 | | | | | | | | | | |
| 3375 | hsa-miR-30b | | 3697 | | | | | | | | | | | | |
| | | | 3688 | | | | | | | | | | | | |
| 3376 | hsa-miR-105 | CAAAUGC | | | | | | | | | | | | | |
| 3377 | hsa-miR-124a | UAAGGCA | | | | | | | | | | | | | |
| 3378 | hsa-miR-128a | GACAGUG | | | | | | | | | | | | | |
| 3379 | hsa-miR-150 | CUCCCAA | | | | | | | | | | | | | |
| 3380 | hsa-miR-154 | AGGUUAU | | | | | | | | | | | | | |
| 3381 | hsa-miR-299-3p | AUGUGGG | | | | | | | | | | | | | |
| 3382 | hsa-miR-380-5p | GGUUGAC | 3691 | | | | | | | | | | | | |
| 3383 | hsa-miR-383 | GAUCAGA | | | | | | | | | | | | | |
| 3384 | hsa-miR-411 | AGUAGAC | | | | | | | | | | | | | |
| 3385 | hsa-miR-423 | GCUCGGU | | | | | | | | | | | | | |
| 3386 | hsa-miR-433 | UCAUGAU | | | | | | | | | | | | | |
| 3387 | hsa-miR-454-3p | AGUGCAA | 3692 | 3696 | 3701 | | | | | 3705 | 3709 | | 3710 | 3711 | |
| | | | 3693 | 3697 | 3702 | | | | | 3706 | | | | | |
| | | | 3694 | 3698 | 3703 | | | | | 3707 | | | | | |
| | | | 3695 | 3699 | 3704 | | | | | 3708 | | | | | |
| | | | | 3700 | | | | | | | | | | | |
| 3388 | hsa-miR-501 | AUCCUUU | | | | | | | | | | | | | |
| 3389 | hsa-miR-504 | GACCCUG | | | | | | | | | | | | | |
| 3390 | hsa-miR-506 | AAGGCAC | | 3732 | 3733 | | | | | | | | | | |
| 3391 | hsa-miR-507 | UUUGCAC | 3738 | | | | | | | | | | | | |
| 3392 | hsa-miR-508 | GAUUGUA | | | | | | | | | | | | | |
| 3393 | hsa-miR-511 | UGUCUUU | | | | | | | | | | | | | |
| 3394 | hsa-miR-512-3p | AGUGCUG | | 3739 | | | | | | | | | | | |
| 3395 | hsa-miR-527 | UGCAAAG | 3741 | | | | | | | | | | | | |
| 3396 | hsa-miR-562 | AAGUAGC | | | | | | | | | | | | | |
| 3397 | hsa-miR-567 | GUAUGUU | | | | | | | | | | | | | |
| 3398 | hsa-miR-589 | CAGAACA | | | | | | | | | | | | | |
| 3399 | hsa-miR-597 | GUGUCAC | | | | | | | | | | | | | |
| 3400 | hsa-miR-605 | AAAUCCC | | | | | | | | | | | | | |
| 3401 | hsa-miR-619 | ACCUGGA | | | | | | | | | | | | | |
| 3402 | hsa-miR-629 | UUCUCCC | | | | | | | | | | | | | |
| 3403 | hsa-miR-640 | UGAUCCA | | | | | | | | | | | | | |
| 3404 | hsa-miR-767-5p | GCACCAU | | | | | | | | | | | | | |
| 3405 | hsa-miR-770-5p | CCAGUAC | | | | | | | | | | | | | |
| 3406 | hsa-miR-802 | AGUAACA | | | | | | | | | | | | | |

TABLE 2-5

| | | sequence of | | | | | | | | | | | | | | |
|---|---|---|---|---|---|---|---|---|---|---|---|---|---|---|---|---|
| | | 2nd to 8th | sequence number of mRNA having sequence with the same 2nd | | | | | | | | | | | | | |
| sequence | | on 5′terminal | to 8th nucleotides on 5′terminal side | | | | | | | | | | | | | |
| number | human miRNA | side | ppy | ssy | lca | cfa | mdo | gga | xla | xtr | bta | oar | ssc | dre | fru | tni |
| 1 | hsa-miR-16 | ACCAGCA | 1266 | | 1268 | 1269 | 1272 | 1273 | | 1275 | 1278 | | | 1281 | 1285 | 1286 |
| 2 | hsa-miR-195 | | 1267 | | | 1270 | | 1274 | | 1276 | 1279 | | | 1282 | | |
| | | | | | | 1271 | | | | 1277 | 1280 | | | 1283 | | |
| | | | | | | | | | | | | | | 1284 | | |
| 3 | hsa-miR-17-3p | CUGCAGU | | | | | | | | | | | | 1289 | | |
| 4 | hsa-miR-18a | AAGGUGC | | | | | | | | | | | | | | |
| 5 | hsa-miR-18b | | | | | | | | | | | | | | | |
| 6 | hsa-miR-20b | AAAGUGC | | | | | | | | | | | | | | |
| 7 | hsa-miR-21 | AGCUUAU | | | | | | | | | | | | | | |
| 8 | hsa-miR-24 | GGCUCAG | | | | | | | | | | | | | | |
| 9 | hsa-miR-25 | AUUGCAC | 1315 | | 1316 | 1317 | 1320 | 1321 | | 1323 | 1327 | | | 1328 | 1331 | 1332 |
| 10 | hsa-miR-32 | | | | | 1318 | | 1322 | | 1324 | | | | 1329 | | |
| | | | | | | 1319 | | | | 1324 | | | | 1330 | | |
| | | | | | | | | | | 1326 | | | | | | |
| 11 | hsa-miR-26b | UCAAGUA | | | | | | | | | | | | | | |
| 12 | hsa-miR-30a-3p | UUUCAGU | | | | | | | | | | | | | | |
| 13 | hsa-miR-34a | GGCAGUG | | | | | | | | | | | | | | |
| 14 | hsa-miR-449 | | | | | | | | | | | | | | | |
| 15 | hsa-miR-449b | | | | | | | | | | | | | | | |
| 16 | hsa-miR-107 | GCAGCAU | 1349 | | | 1350 | 1351 | 1352 | | 1353 | 1354 | | 1355 | 1356 | 1357 | 1358 |
| 17 | hsa-miR-140 | GUGGUUU | | | | | | | | | | | | | | |
| 18 | hsa-miR-148b | CAGUGCA | | | | 1364 | 1365 | | | | | | | 1366 | 1367 | 1368 |
| 19 | hsa-miR-190 | GAUAUCU | | | | | | | | | | | | | | |
| 20 | hsa-miR-199a | CCACUGU | | | | | | | | | | | | | | |
| 21 | hsa-miR-199b | | | | | | | | | | | | | | | |
| 22 | hsa-miR-202* | UUCCUAU | | | | | | | | | | | | | | |
| 23 | hsa-miR-208 | UAAGACG | | | | | | | | | | | | 1371 | | |
| 24 | hsa-miR-210 | UGUGCGU | | | | | | | | | | | | | | |
| 25 | hsa-miR-211 | UCCCUUU | 1381 | | | 1382 | 1383 | 1384 | | 1385 | 1386 | | 1387 | 1388 | 1389 | 1390 |
| | | | | | | | | | | | | | | | | 1391 |
| 26 | hsa-miR-214 | CAGCAGG | | | | | | | | | | | | | | |
| 27 | hsa-miR-218 | UGUGCUU | | | | | | | | | | | | | | |
| 28 | hsa-miR-299-5p | GGUUUAC | | | | | | | | | | | | | | |
| 29 | hsa-miR-325 | CUAGUAG | | | | | | | | | | | | | | |
| 30 | hsa-miR-328 | UGGCCCU | | | | | | | | | | | | | | |
| 31 | hsa-miR-329 | ACACACC | | | | | | | | | | | | | | |
| 32 | hsa-miR-338 | CCAGCAU | | | | | | | | | | | | | | |
| 33 | hsa-miR-345 | GCUGACU | | | | | | | | | | | | | | |
| 34 | hsa-miR-425-5p | AUGACAC | | | | | | | | | | | | 1397 | | |
| 35 | hsa-miR-484 | CAGGCUC | | | | | | | | | | | | | | |
| 36 | hsa-miR-485-5p | GAGGCUG | | | | | | | | | | | | | | |
| 37 | hsa-miR-486 | CCUGUAG | | | | | | | | | | | | | | |
| 38 | hsa-miR-488 | CCAGAUA | | | | | | | | | | | | | | |
| 39 | hsa-miR-510 | ACUCAGG | | | | | | | | | | | | | | |
| 40 | hsa-miR-515-3p | AGUGCCU | | | | | | | | | | | | | | |
| 41 | hsa-miR-515-5p | UCUCCAA | | | | | | | | | | | | | | |
| 42 | hsa-miR-517* | CUCUAGA | | | | | | | | | | | | | | |
| 43 | hsa-miR-520d | AAGUGCU | 1435 | | | 1436 | 1437 | 1442 | 1445 | 1447 | | | | 1450 | | |
| | | | | | | | 1438 | 1443 | 1446 | 1448 | | | | 1451 | | |
| | | | | | | | 1439 | 1444 | | 1449 | | | | 1452 | | |
| | | | | | | | 1440 | | | | | | | 1453 | | |
| | | | | | | | 1441 | | | | | | | 1454 | | |
| 44 | hsa-miR-520f | AGUGCUU | | | | | | 1456 | | | | | | | | |
| 45 | hsa-miR-520h | CAAAGUG | | | | | | | | | | | | | | |
| 46 | hsa-miR-522 | AAAUGGU | | | | | | | | | | | | | | |
| 47 | hsa-miR-525* | AAGGCGC | | | | | | | | | | | | | | |
| 48 | hsa-miR-573 | UGAAGUG | | | | | | | | | | | | | | |
| 49 | hsa-miR-587 | UUCCAUA | | | | | | | | | | | | | | |
| 50 | hsa-miR-593 | GGCACCA | | | | | | | | | | | | | | |

TABLE 2-6

sequence of

| | | 2nd to 8th | sequence number of mRNa having sequence with the same 2nd | | | | | | | | | | | | | |
|---|---|---|---|---|---|---|---|---|---|---|---|---|---|---|---|---|
| sequence | | on 5′terminal | to 8th nucleotides on 5′terminal side | | | | | | | | | | | | | |
| number | human miRNA | side | ppy | ssy | lca | cfa | mdo | gga | xla | xtr | bta | oar | ssc | dre | fru | tni |
| 51 | hsa-miR-595 | AAGUGUG | | | | | | | | | | | | | | |
| 52 | hsa-miR-604 | GGCUGCG | | | | | | | | | | | | | | |
| 53 | hsa-miR-612 | CUGGGCA | | | | | | | | | | | | | | |
| 54 | hsa-miR-625 | GGGGGAA | | | | | | | | | | | | | | |
| 55 | hsa-miR-634 | ACCAGCA | | | | | | | | | | | | | | |
| 56 | hsa-miR-635 | CUUGGGC | | | | | | | | | | | | | | |
| 57 | hsa-miR-637 | CUGGGGG | | | | | | | | | | | | | | |
| 58 | hsa-miR-647 | UGGCUCC | | | | | | | | | | | | | | |
| 59 | hsa-miR-650 | GGAGGCA | | | | | | | | | | | | | | |
| 60 | hsa-miR-654 | GGUGGGC | | | | | | | | | | | | | | |
| 61 | hsa-miR-658 | GCGGACG | | | | | | | | | | | | | | |
| 62 | hsa-miR-660 | ACCCAUU | | | | | | | | | | | | | | |
| 63 | hsa-miR-668 | GUCACUC | | | | | | | | | | | | | | |
| 64 | hsa-miR-675 | GGUGCGG | | | | | | | | | | | | | | |
| 65 | hsa-miR-765 | GGAGGAG | | | | | | | | | | | | | | |
| 66 | hsa-miR-766 | CUCCAGC | | | | | | | | | | | | | | |
| 67 | hsa-miR-194 | GUAACAG | | | | | | | | | | | | | | |
| 68 | hsa-miR-500 | UGCACCU | | | | | | | | | | | | | | |
| 69 | hsa-miR-197 | UCACCAC | | | | | | | | | | | | | | |
| 70 | hsa-miR-221 | GCUACAU | | | | | | | | | | | | | | |
| 71 | hsa-let-7e | GAGGUAG | 1477 | | | 1478 | | | | 1479 | 1480 | | | | | |
| 72 | hsa-miR-1 | GGAAUGU | | | | | | | | | | | | | | |
| 73 | hsa-miR-206 | | | | | | | | | | | | | | | |
| 74 | hsa-miR-613 | | | | | | | | | | | | | | | |
| 75 | hsa-miR-9 | CUUUGGU | | | | | | | | | | | | | | |
| 76 | hsa-miR-23b | UCACAUU | | | | | | | | | | | | | | |
| 77 | hsa-miR-27b | UCACAGU | | | | | | | | | | | | | | |
| 78 | hsa-miR-28 | AGGAGCU | | | | 1487 | | | | | | | | | | |
| 79 | hsa-miR-31 | GCAAGAU | | | | | | | | | | | | | | |
| 80 | hsa-miR-33b | UGCAUUG | | | | | | | | | | | | | | |
| 81 | hsa-miR-96 | UUGGCAC | | | | 1491 | | | | | | | | | | |
| 82 | hsa-miR-100 | ACCCGUA | 1505 | | | 1506 | | 1508 | | 1509 | 1510 | | 1512 | 1513 | | |
| | | | | | | 1507 | | | | | 1511 | | | | | |
| 83 | hsa-miR-106a | AAACUGC | | | | | | | | | | | | | | |
| 84 | hsa-miR-126* | AUUAUUA | | | | | | | | | | | | | | |
| 85 | hsa-miR-127 | CGGAUCC | | | | | | | | | | | | | | |
| 86 | hsa-miR-128b | CACAGUG | | | | | | | | | | | | | | |
| 87 | hsa-miR-129 | UUUUUGC | | | | | | | | | | | | 1515 | | |
| 88 | hsa-miR-133a | UGGUCCC | | | | | | | | | | | | | | |
| 89 | hsa-miR-133b | | | | | | | | | | | | | | | |
| 90 | hsa-miR-135b | AUGGCUU | | | | | | | | | | | | | | |
| 91 | hsa-miR-136 | CUCCAUU | | | | | | | | | | | | | | |
| 92 | hsa-miR-142-5p | AUAAAGU | | | | | | | | | | | | | | |
| 93 | hsa-miR-146a | GAGAACU | | | | | | | | | | | | | | |
| 94 | hsa-miR-146b | | | | | | | | | | | | | | | |
| 95 | hsa-miR-181a | ACAUUCA | | | | | | | | | | | | | | |
| 96 | hsa-miR-182* | GGUUCUA | | | | | | | | | | | | | | |
| 97 | hsa-miR-183 | AUGGCAC | | | | | | | | | | | | | | |
| 98 | hsa-miR-187 | CGUGUCU | | | | | | | | | | | | | | |
| 99 | hsa-miR-192 | UGACCUA | | | | | | | | | | | | | | |
| 100 | hsa-miR-215 | | | | | | | | | | | | | | | |

TABLE 2-7

| | | sequence of | | | | | | | | | | | | | | |
|---|---|---|---|---|---|---|---|---|---|---|---|---|---|---|---|---|
| | | 2nd to 8th | | | | | | | | | | | | | | |
| | | on | sequence number of mRNA having sequence with the same 2nd | | | | | | | | | | | | | |
| sequence | | 5′terminal | to 8th nucleotides on 5′terminal side | | | | | | | | | | | | | |
| number | human miRNA | side | ppy | ssy | lca | cfa | mdo | gga | xla | xtr | bta | oar | ssc | dre | fru | tni |
| 101 | hsa-miR-200a* | AUCUUAC | | | | | | | | | | | | | | |
| 102 | hsa-miR-216 | AAUCUCA | | | | | | | | | | | | | | |
| 103 | hsa-miR-217 | ACUGCAU | | | | | | | | | | | | | | |
| 104 | hsa-miR-220 | CACACCG | | | | | | | | | | | | | | |
| 105 | hsa-miR-222 | GCUACAU | | | | | | | | | | | | | | |
| 106 | hsa-miR-223 | GUCAGUU | | | | | | | | | | | | | | |
| 107 | hsa-miR-224 | AAGUCAC | | | | | | | | | | | | | | |
| 108 | hsa-miR-296 | GGGCCCC | | | | | | | | | | | | | | |
| 109 | hsa-miR-302b* | CUUUAAC | | | | | | | | | | | | | | |
| 110 | hsa-miR-302c* | UUAACAU | | | | | | | | | | | | | | |
| 111 | hsa-miR-362 | AUCCUUG | | | | | | | | | | | | | | |
| 112 | hsa-miR-373* | CUCAAAA | | | | | | | | | | | | | | |
| 113 | hsa-miR-374 | UAUAAUA | | | | | | | | | | | | | | |
| 114 | hsa-miR-376a | UCAUAGA | | | | | | | | | | | | | | |
| 115 | hsa-miR-378 | UCCUGAC | | | | | | | | | | | | | | |
| 116 | hsa-miR-409-3p | GAAUGUU | | | | | | | | | | | | | | |
| 117 | hsa-miR-409-5p | GGUUACC | | | | | | | | | | | | | | |
| 118 | hsa-miR-429 | AAUACUG | | | | | | | | | | | | | | |
| 119 | hsa-miR-200c | | | | | | | | | | | | | | | |
| 120 | hsa-miR-432* | UGGAUGG | | | | | | | | | | | | | | |
| 121 | hsa-miR-448 | UGCAUAU | | | | | | | | | | | | | | |
| 122 | hsa-miR-450 | UUUUGCG | | | | | | | | | | | | | | |
| 123 | hsa-miR-451 | AACCGUU | | | | | | | | | | | | | | |
| 124 | hsa-miR-452 | GUUUGCA | | | | | | | | | | | | | | |
| 125 | hsa-miR-487b | AUCGUAC | | | | | | | | | | | | | | |
| 126 | hsa-miR-489 | GUGACAU | | | | | | | | | | | | | | |
| 127 | hsa-miR-514 | UUGACAC | | | | | | | | | | | | | | |
| 128 | hsa-miR-517c | UCGUGCA | | | | | | | | | | | | | | |
| 129 | hsa-miR-518c | AAAGCGC | | | | | | | | | | | | | | |
| 130 | hsa-miR-524* | UACAAAG | | | | | | | | | | | | | | |
| 131 | hsa-miR-542-3p | GUGACAG | | | | | | | | | | | | | | |
| 132 | hsa-miR-544 | UUCUGCA | | | | | | | | | | | | | | |
| 133 | hsa-miR-545 | UCAGCAA | | | | | | | | | | | | | | |
| 134 | hsa-miR-550 | GUCUUAC | | | | | | | | | | | | | | |
| 135 | hsa-miR-552 | ACAGGUG | | | | | | | | | | | | | | |
| 136 | hsa-miR-596 | AGCCUGC | | | | | | | | | | | | | | |
| 137 | hsa-miR-601 | GGUCUAG | | | | | | | | | | | | | | |
| 138 | hsa-miR-608 | GGGGUGG | | | | | | | | | | | | | | |
| 139 | hsa-miR-609 | GGGUGUU | | | | | | | | | | | | | | |
| 140 | hsa-miR-617 | GACUUCC | | | | | | | | | | | | | | |
| 141 | hsa-miR-627 | UGAGUCU | | | | | | | | | | | | | | |
| 142 | hsa-miR-632 | UGUCUGC | | | | | | | | | | | | | | |
| 143 | hsa-miR-644 | GUGUGGC | | | | | | | | | | | | | | |
| 144 | hsa-miR-659 | UUGGUUC | | | | | | | | | | | | | | |
| 145 | hsa-miR-769-5p | GAGACCU | | | | | | | | | | | | | | |
| 146 | hsa-miR-801 | AUUGCUC | | | | | | | | | | | | | | |
| 147 | hsa-miR-365 | AAUGCCC | | | | | | | | | | | | | | |
| 148 | hsa-miR-142-3p | GUACUGU | | | | | | | | | | | | | | |
| 149 | hsa-miR-200a | AACACUG | | | | | 1542 | | | | | | | 1543 | | |
| 150 | hsa-miR-361 | UAUCAGA | | | | | | | | | | | | | | |

TABLE 2-8

| | | sequence of | | | | | | | | | | | | | | |
|---|---|---|---|---|---|---|---|---|---|---|---|---|---|---|---|---|
| | | 2nd to 8th | sequence number of mRNA having sequence with the same 2nd | | | | | | | | | | | | | |
| sequence | | on 5′terminal | to 8th nucleotides on 5′ terminal side | | | | | | | | | | | | | |
| number | human miRNA | side | ppy | ssy | lca | cfa | mdo | gga | xla | xtr | bta | oar | ssc | dre | fru | tni |
| 3372 | hsa-miR-29a | AGCACCA | | | | | | | | | | | | | | |
| 3373 | hsa-miR-29b | | | | | | | | | | | | | | | |
| 3374 | hsa-miR-30a-5p | GUAAACA | | | | | | | | | | | | | | |
| 3375 | hsa-miR-30b | | | | | | | | | | | | | | | |
| 3376 | hsa-miR-105 | CAAAUGC | | | | | | | | | | | | | | |
| 3377 | hsa-miR-124a | UAAGGCA | | | | | | | | | | | | | | |
| 3376 | hsa-miR-128a | CACAGUG | | | | | | | | | | | | | | |
| 3379 | hsa-miR-150 | CUCCCAA | | | | | | | | | | | | | | |
| 3380 | hsa-miR-154 | AGGUUAU | | | | | | | | | | | | | | |
| 3381 | hsa-miR-299-3p | AUGUGGG | | | | | | | | | | | | | | |
| 3382 | hsa-miR-380-5p | GGUUGAC | | | | | | | | | | | | | | |
| 3383 | hsa-miR-383 | GAUCAGA | | | | | | | | | | | | | | |
| 3384 | hsa-miR-411 | AGUAGAC | | | | | | | | | | | | | | |
| 3385 | hsa-miR-423 | GCUCGGU | | | | | | | | | | | | | | |
| 3386 | hsa-miR-433 | UCAUGAU | | | | | | | | | | | | | | |
| 3387 | hsa-miR-454-3p | AGUGCAA | | | | 3712 | 3714 | 3715 | | 3718 | | | | 3722 | 3728 | 3730 |
| | | | | | | 3713 | | 3716 | | 3719 | | | | 3723 | 3729 | 3731 |
| | | | | | | | | 3717 | | 3720 | | | | 3724 | | |
| | | | | | | | | | | 3721 | | | | 3725 | | |
| | | | | | | | | | | | | | | 3726 | | |
| | | | | | | | | | | | | | | 3727 | | |
| 3388 | hsa-miR-501 | AUCCUUU | | | | | | | | | | | | | | |
| 3389 | hsa-miR-504 | GACCCUC | | | | | | | | | | | | | | |
| 3390 | hsa-miR-506 | AAGGCAC | | | | 3734 | | | | | | | | 3735 | 3736 | 3737 |
| 3391 | hsa-miR-507 | UUUGCAC | | | | | | | | | | | | | | |
| 3392 | hsa-miR-508 | GAUUGUA | | | | | | | | | | | | | | |
| 3393 | hsa-miR-511 | UGUCUUU | | | | | | | | | | | | | | |
| 3394 | hsa-miR-512-3p | AGUGCUG | | | | | | | | 3740 | | | | | | |
| 3395 | hsa-miR-527 | UGCAAAG | | | | | | | | | | | | | | |
| 3396 | hsa-miR-562 | AAGUAGC | | | | | | | | | | | | | | |
| 3397 | hsa-miR-567 | GUAUGUU | | | | | | | | | | | | | | |
| 3398 | hsa-miR-589 | CAGAACA | | | | | | | | | | | | | | |
| 3399 | hsa-miR-697 | GUGUCAC | | | | | | | | | | | | | | |
| 3400 | hsa-miR-605 | AAAUCCC | | | | | | | | | | | | | | |
| 3401 | hsa-miR-619 | ACCUGGA | | | | | | | | | | | | | | |
| 3402 | hsa-miR-629 | UUCUCCC | | | | | | | | | | | | | | |
| 3403 | haa-miR-640 | UGAUCCA | | | | | | | | | | | | | | |
| 3404 | hsa-mir-767-5p | GCACCAU | | | | | | | | | | | | | | |
| 3405 | hsa-miR-770-5p | CCAGUAC | | | | | | | | | | | | | | |
| 3406 | hsa-miR-802 | AGUAACA | | | | | | | | | | | | | | |

[0041] As the above-described nucleic acids, micro-RNA precursors are also used preferably. A micro-RNA precursor is a nucleic acid about 50 to about 200 nucleotides long, more preferably about 70 to about 100 nucleotides long, including the above-described nucleic acids used in the present invention, and capable of forming a hairpin structure. A micro-RNA is produced from a micro-RNA precursor via processing by a protein called Dicer.

[0042] As examples of micro-RNA precursors used in the present invention for the human micro-RNAs of SEQ ID NO:1, nucleic acids consisting of a nucleotide sequence of any one of SEQ ID NOs:1544 to 1545 can be mentioned. For the micro-RNAs of SEQ ID NOs:2 to 1543 and 3372 to 3741, nucleic acids consisting of a nucleotide sequence of any one of SEQ ID NOs:1546 to 3371 and 3742 to 4147 can be mentioned. Tables of the correspondence of micro-RNAs and micro-RNA precursors used in the present invention are shown in Table 3-1 to Table 3-39.

TABLE 3-1

| sequence | | sequence | miRNA |
|---|---|---|---|
| number | miRNA name | number | precursor name |
| 1 | hsa-miR-16 | 1544 | hsa-mir-16-1 |
| | | 1545 | hsa-mir-16-2 |
| 2 | hsa-miR-195 | 1546 | hsa-mir-195 |
| 3 | hsa-miR-17-3p | 1547 | hsa-mir-17 |
| 4 | hsa-miR-18a | 1548 | hsa-mir-18a |
| 5 | hsa-miR-18b | 1549 | hsa-mir-18b |
| 6 | hsa-miR-20b | 1550 | hsa-mir-20b |
| 7 | hsa-miR-21 | 1551 | hsa-mir-21 |
| 8 | hsa-miR-24 | 1552 | hsa-mir-24-1 |
| | | 1553 | hsa-mir-24-2 |
| 9 | hsa-miR-25 | 1554 | hsa-mir-25 |
| 10 | hsa-miR-32 | 1555 | hsa-mir-32 |
| 11 | hsa-miR-26b | 1556 | hsa-mir-26b |
| 12 | hsa-miR-30a-3p | 1557 | hsa-mir-30a |
| 13 | hsa-miR-34a | 1558 | hsa-mir-34a |
| 14 | hsa-miR-449 | 1559 | hsa-mir-449 |
| 15 | hsa-miR-449b | 1560 | hsa-mir-449b |
| 16 | hsa-miR-107 | 1561 | hsa-mir-107 |
| 17 | hsa-miR-140 | 1562 | hsa-mir-140 |
| 18 | hsa-miR-148b | 1563 | hsa-mir-148b |
| 19 | hsa-miR-190 | 1564 | hsa-mir-190 |
| 20 | hsa-miR-199a | 1565 | hsa-mir-199a-1 |
| | | 1566 | hsa-mir-199a-2 |
| 21 | hsa-miR-199b | 1567 | hsa-mir-199b |
| 22 | hsa-miR-202* | 1568 | hsa-mir-202 |
| 23 | hsa-miR-208 | 1569 | hsa-mir-208 |
| 24 | hsa-miR-210 | 1570 | hsa-mir-210 |
| 25 | hsa-miR-211 | 1571 | hsa-mir-211 |
| 26 | hsa-miR-214 | 1572 | hsa-mir-214 |
| 27 | hsa-miR-218 | 1573 | hsa-mir-218-1 |
| | | 1574 | hsa-mir-218-2 |
| 28 | hsa-miR-299-5p | 1575 | hsa-mir-299 |
| 29 | hsa-miR-325 | 1576 | hsa-mir-325 |
| 30 | hsa-miR-328 | 1577 | hsa-mir-328 |
| 31 | hsa-miR-329 | 1578 | hsa-mir-329-1 |
| | | 1579 | hsa-mir-329-2 |
| 32 | hsa-miR-338 | 1580 | hsa-mir-338 |
| 33 | hsa-miR-345 | 1581 | hsa-mir-345 |
| 34 | hsa-miR-425-5p | 1582 | hsa-mir-425 |
| 35 | hsa-miR-484 | 1583 | hsa-mir-484 |
| 36 | hsa-miR-485-5p | 1584 | hsa-mir-485 |
| 37 | hsa-miR-486 | 1585 | hsa-mir-486 |
| 38 | hsa-miR-488 | 1586 | hsa-mir-488 |
| 39 | hsa-miR-510 | 1587 | hsa-mir-510 |
| 40 | hsa-miR-515-3p | 1588 | hsa-mir-515-1 |
| | | 1589 | hsa-mir-515-2 |
| 41 | hsa-miR-515-5p | 1588 | hsa-mir-515-1 |
| | | 1589 | hsa-mir-515-2 |
| 42 | hsa-miR-517* | 1590 | hsa-mir-517a |
| | | 1591 | hsa-mir-517b |
| | | 1592 | hsa-mir-517c |
| 43 | hsa-miR-520d | 1593 | hsa-mir-520d |
| 44 | hsa-miR-520f | 1594 | hsa-mir-520f |
| 45 | hsa-miR-520h | 1595 | hsa-mir-520h |
| 46 | hsa-miR-522 | 1596 | hsa-mir-522 |
| 47 | hsa-miR-525* | 1597 | hsa-mir-525 |
| 48 | hsa-miR-573 | 1598 | hsa-mir-573 |
| 49 | hsa-miR-587 | 1599 | hsa-mir-587 |
| 50 | hsa-miR-593 | 1600 | hsa-mir-593 |

TABLE 3-2

| sequence | | sequence | miRNA |
|---|---|---|---|
| number | miRNA name | number | precursor name |
| 51 | hsa-miR-595 | 1601 | hsa-mir-595 |
| 52 | hsa-miR-604 | 1602 | hsa-mir-604 |
| 53 | hsa-miR-612 | 1603 | hsa-mir-612 |
| 54 | hsa-miR-625 | 1604 | hsa-mir-625 |
| 55 | hsa-miR-634 | 1605 | hsa-mir-634 |
| 56 | hsa-miR-635 | 1606 | hsa-mir-635 |
| 57 | hsa-miR-637 | 1607 | hsa-mir-637 |
| 58 | hsa-miR-647 | 1608 | hsa-mir-647 |
| 59 | hsa-miR-650 | 1609 | hsa-mir-650 |
| 60 | hsa-miR-654 | 1610 | hsa-mir-654 |
| 61 | hsa-miR-658 | 1611 | hsa-mir-658 |
| 62 | hsa-miR-660 | 1612 | hsa-mir-660 |
| 63 | hsa-miR-668 | 1613 | hsa-mir-668 |
| 64 | hsa-miR-675 | 1614 | hsa-mir-675 |
| 65 | hsa-miR-765 | 1615 | hsa-mir-765 |
| 66 | hsa-miR-766 | 1616 | hsa-mir-766 |
| 67 | hsa-miR-194 | 1617 | hsa-mir-194-1 |
| | | 1618 | hsa-mir-194-2 |
| 68 | hsa-miR-500 | 1619 | hsa-mir-500 |
| 69 | hsa-miR-197 | 1620 | hsa-mir-197 |
| 70 | hsa-miR-221 | 1621 | hsa-mir-221 |
| 71 | hsa-miR-7e | 1622 | hsa-mir-7e |
| 72 | hsa-miR-1 | 1623 | hsa-mir-1-1 |
| | | 1624 | hsa-mir-1-2 |
| 73 | hsa-miR-206 | 1625 | hsa-mir-206 |
| 74 | hsa-miR-613 | 1626 | hsa-mir-613 |
| 75 | hsa-miR-9 | 1627 | hsa-mir-9-1 |
| | | 1628 | hsa-mir-9-2 |
| | | 1629 | hsa-mir-9-3 |
| 76 | hsa-miR-23b | 1630 | hsa-mir-23b |
| 77 | hsa-miR-27b | 1631 | hsa-mir-27b |
| 78 | hsa-miR-28 | 1632 | hsa-mir-28 |
| 79 | hsa-miR-31 | 1633 | hsa-mir-31 |
| 80 | hsa-miR-33b | 1634 | hsa-mir-33b |
| 81 | hsa-miR-96 | 1635 | hsa-mir-96 |
| 82 | hsa-miR-100 | 1636 | hsa-mir-100 |
| 83 | hsa-miR-106a | 1637 | hsa-mir-106a |
| 84 | hsa-miR-126* | 1638 | hsa-mir-126 |
| 85 | hsa-miR-127 | 1639 | hsa-mir-127 |
| 86 | hsa-miR-128b | 1640 | hsa-mir-128b |
| 87 | hsa-miR-129 | 1641 | hsa-mir-129-1 |
| | | 1642 | hsa-mir-129-2 |
| 88 | hsa-miR-133a | 1643 | hsa-mir-133a-1 |
| | | 1644 | hsa-mir-133a-2 |
| 89 | hsa-miR-133b | 1645 | hsa-mir-133b |
| 90 | hsa-miR-135b | 1646 | hsa-mir-135b |
| 91 | hsa-miR-136 | 1647 | hsa-mir-136 |
| 92 | hsa-miR-142-5p | 1648 | hsa-mir-142 |
| 93 | hsa-miR-146a | 1649 | hsa-mir-146a |
| 94 | hsa-miR-146b | 1650 | hsa-mir-146b |
| 95 | hsa-miR-181a | 1651 | hsa-mir-181a |
| 96 | hsa-miR-182* | 1652 | hsa-mir-183 |
| 97 | hsa-miR-183 | 1653 | hsa-mir-183 |
| 98 | hsa-miR-187 | 1654 | hsa-mir-187 |
| 99 | hsa-miR-192 | 1655 | hsa-mir-192 |
| 100 | hsa-miR-215 | 1656 | hsa-mir-215 |

TABLE 3-3

| sequence | | sequence | miRNA |
|---|---|---|---|
| number | miRNA name | number | precursor name |
| 101 | hsa-miR-200a* | 1657 | hsa-mir-200a |
| 102 | hsa-miR-216 | 1658 | hsa-mir-216 |
| 103 | hsa-miR-217 | 1659 | hsa-mir-217 |
| 104 | hsa-miR-220 | 1660 | hsa-mir-220 |
| 105 | hsa-miR-222 | 1661 | hsa-mir-222 |
| 106 | hsa-miR-223 | 1662 | hsa-mir-223 |
| 107 | hsa-miR-224 | 1663 | hsa-mir-224 |
| 108 | hsa-miR-296 | 1664 | hsa-mir-296 |
| 109 | hsa-miR-302b* | 1665 | hsa-mir-302b |
| 110 | hsa-miR-302c* | 1666 | hsa-mir-302c |
| 111 | hsa-miR-362 | 1667 | hsa-mir-362 |
| 112 | hsa-miR-373* | 1668 | hsa-mir-373 |
| 113 | hsa-miR-374 | 1669 | hsa-mir-374 |
| 114 | hsa-miR-376a | 1670 | hsa-mir-376a-1 |
| | | 1671 | hsa-mir-376a-2 |
| 115 | hsa-miR-378 | 1672 | hsa-mir-378 |
| 116 | hsa-miR-409-3p | 1673 | hsa-mir-409 |
| 117 | hsa-miR-409-5p | 1673 | hsa-mir-409 |
| 118 | hsa-miR-429 | 1674 | hsa-mir-429 |
| 119 | hsa-miR-200c | 1675 | hsa-mir-200c |
| 120 | hsa-miR-432* | 1676 | hsa-mir-432 |
| 121 | hsa-miR-448 | 1677 | hsa-mir-448 |
| 122 | hsa-miR-450 | 1678 | hsa-mir-450-1 |
| | | 1679 | hsa-mir-450-1 |
| 123 | hsa-miR-451 | 1680 | hsa-mir-451 |
| 124 | hsa-miR-452 | 1681 | hsa-mir-452 |
| 125 | hsa-miR-487b | 1682 | hsa-mir-487b |
| 126 | hsa-miR-489 | 1683 | hsa-mir-489 |
| 127 | hsa-miR-514 | 1685 | hsa-mir-514-1 |
| | | 1685 | hsa-mir-514-2 |
| | | 1686 | hsa-mir-514-3 |
| 128 | hsa-miR-517c | 1592 | hsa-mir-517c |
| 129 | hsa-miR-518c | 1687 | hsa-mir-518c |
| 130 | hsa-miR-524* | 1688 | hsa-mir-524 |
| 131 | hsa-miR-542-3p | 1689 | hsa-mir-542 |
| 132 | hsa-miR-544 | 1690 | hsa-mir-544 |
| 133 | hsa-miR-545 | 1691 | hsa-mir-545 |
| 134 | hsa-miR-550 | 1692 | hsa-mir-550-1 |
| | | 1693 | hsa-mir-550-2 |
| 135 | hsa-miR-552 | 1694 | hsa-mir-552 |
| 136 | hsa-miR-596 | 1695 | hsa-mir-596 |
| 137 | hsa-miR-601 | 1696 | hsa-mir-601 |
| 138 | hsa-miR-608 | 1697 | hsa-mir-608 |
| 139 | hsa-miR-609 | 1698 | hsa-mir-609 |
| 140 | hsa-miR-617 | 1699 | hsa-mir-617 |
| 141 | hsa-miR-627 | 1700 | hsa-mir-627 |
| 142 | hsa-miR-632 | 1701 | hsa-mir-632 |
| 143 | hsa-miR-644 | 1702 | hsa-mir-644 |
| 144 | hsa-miR-659 | 1703 | hsa-mir-659 |
| 145 | hsa-miR-769-5p | 1704 | hsa-mir-769 |
| 146 | hsa-miR-801 | 1705 | hsa-mir-801 |
| 147 | hsa-miR-365 | 1706 | hsa-mir-365-1 |
| | | 1707 | hsa-mir-365-2 |
| 148 | hsa-miR-142-3p | 1648 | hsa-mir-142 |
| 149 | hsa-miR-200a | 1657 | hsa-mir-200a |
| 150 | hsa-miR-361 | 1708 | hsa-mir-361 |

TABLE 3-4

| sequence | | sequence | miRNA |
|---|---|---|---|
| number | miRNA name | number | precursor name |
| 151 | mmu-miR-16 | 1709 | mmu-mir-16-1 |
| | | 1710 | mmu-mir-16-2 |
| 152 | rno-miR-16 | 1711 | rno-mir-16 |
| 153 | age-miR-16 | 1712 | age-mir-16 |
| 154 | lla-miR-16 | 1713 | lla-mir-16 |
| 155 | sla-miR-16 | 1714 | sla-mir-16 |
| 156 | mml-miR-16 | 1715 | mml-mir-16-1 |
| | | 1716 | mml-mir-16-2 |
| 157 | mne-miR-16 | 1717 | mne-mir-16 |
| 158 | ggo-miR-16 | 1718 | ggo-mir-16 |
| 159 | ppa-miR-16 | 1719 | ppa-mir-16 |
| 160 | ptr-miR-16 | 1720 | ptr-mir-16 |
| 161 | ppy-miR-16 | 1721 | ppy-mir-16 |
| 162 | lca-miR-16 | 1722 | lca-mir-16 |
| 163 | cfa-miR-16 | 1723 | cfa-mir-16-1 |
| | | 1724 | cfa-mir-16-2 |
| 164 | mdo-miR-16 | 1725 | mdo-mir-16 |
| 165 | gga-miR-16 | 1726 | gga-mir-16-1 |
| | | 1727 | gga-mir-16-2 |
| 166 | xtr-miR-16a | 1728 | xtr-mir-16a |
| 167 | xtr-miR-16b | 1729 | xtr-mir-16b |
| 168 | bta-miR-16 | 1730 | bta-mir-16 |
| 169 | dre-miR-16a | 1731 | dre-mir-16a |
| 170 | dre-miR-16b | 1732 | dre-mir-16b |
| 171 | dre-miR-16c | 1733 | dre-mir-16c |
| 172 | fru-miR-16 | 1734 | fru-mir-16 |
| 173 | tni-miR-16 | 1735 | tni-mir-16 |
| 174 | mmu-miR-195 | 1736 | mmu-mir-195 |
| 175 | rno-miR-195 | 1737 | rno-mir-195 |
| 176 | mml-miR-195 | 1738 | mml-mir-195 |
| 177 | ggo-miR-195 | 1739 | ggo-mir-195 |
| 178 | ppa-miR-195 | 1740 | ppa-mir-195 |
| 179 | cfa-miR-195 | 1741 | cfa-mir-195 |
| 180 | bta-miR-195 | 1742 | bta-mir-195 |
| 181 | rno-miR-17-3p | 1743 | rno-mir-17-1 |
| | | 1744 | rno-mir-17-2 |
| 182 | age-miR-17-3p | 1745 | age-mir-17 |
| 183 | lla-miR-17-3p | 1746 | lla-mir-17 |
| 184 | sla-miR-17-3p | 1747 | sla-mir-17 |
| 185 | mml-miR-17-3p | 1748 | mml-mir-17 |
| 186 | mne-miR-17-3p | 1749 | mne-mir-17 |
| 187 | ggo-miR-17-3p | 1750 | ggo-mir-17 |
| 188 | ppa-miR-17-3p | 1751 | ppa-mir-17 |
| 189 | ptr-miR-17-3p | 1752 | ptr-mir-17 |
| 190 | ppy-miR-17-3p | 1753 | ppy-mir-17 |
| 191 | lca-miR-17-3p | 1754 | lca-mir-17 |
| 192 | mdo-miR-17-3p | 1755 | mdo-mir-17 |
| 193 | gga-miR-17-3p | 1756 | gga-mir-17 |
| 194 | xtr-miR-17-3p | 1757 | xtr-mir-17 |
| 195 | bta-miR-17-3p | 1758 | bta-mir-17 |
| 196 | mmu-miR-18a | 1759 | mmu-mir-18a |
| 197 | rno-miR-18a | 1760 | rno-mir-18a |
| 198 | age-miR-18 | 1761 | age-mir-18 |
| 199 | lla-miR-18 | 1762 | lla-mir-18 |
| 200 | sla-miR-18 | 1763 | sla-mir-18 |

TABLE 3-5

| sequence | | sequence | miRNA |
|---|---|---|---|
| number | miRNA name | number | precursor name |
| 201 | mml-miR-18 | 1764 | mml-mir-18 |
| 202 | mne-miR-18 | 1765 | mne-mir-18 |
| 203 | ggo-miR-18 | 1766 | ggo-mir-18 |
| 204 | ppa-miR-18 | 1767 | ppa-mir-18 |
| 205 | ptr-miR-18 | 1768 | ptr-mir-18 |
| 206 | ppy-miR-18 | 1769 | ppy-mir-18 |
| 207 | lca-miR-18 | 1770 | lca-mir-18 |
| 208 | mdo-miR-18 | 1771 | mdo-mir-18 |
| 209 | gga-miR-18a | 1772 | gga-mir-18a |
| 210 | xtr-miR-18a | 1773 | xtr-mir-18a |
| 211 | bta-miR-18a | 1774 | bta-mir-18a |
| 212 | ssc-miR-18 | 1775 | ssc-mir-18 |
| 213 | dre-miR-18a | 1776 | dre-mir-18a |
| 214 | dre-miR-18c | 1777 | dre-mir-18c |
| 215 | fru-miR-18 | 1778 | fru-mir-18 |
| 216 | tni-miR-18 | 1779 | tni-mir-18 |
| 217 | mmu-miR-18b | 1780 | mmu-mir-18b |
| 218 | mml-miR-18b | 1781 | mml-mir-18b |
| 219 | gga-miR-18b | 1782 | gga-mir-18b |
| 220 | xtr-miR-18b | 1783 | xtr-mir-18b |
| 221 | bta-miR-18b | 1784 | bta-mir-18b |
| 222 | dre-miR-18b | 1785 | dre-mir-18b |
| 223 | mmu-miR-20b | 1786 | mmu-mir-20b |
| 224 | rno-miR-20a | 1787 | rno-mir-20a |
| 225 | age-miR-20 | 1788 | age-mir-20 |
| 226 | lla-miR-20 | 1789 | lla-mir-20 |
| 227 | sla-miR-20 | 1790 | sla-mir-20 |
| 228 | mml-miR-20a | 1791 | mml-mir-20a |
| 229 | mml-miR-20b | 1792 | mml-mir-20b |
| 230 | mne-miR-20 | 1793 | mne-mir-20 |
| 231 | ggo-miR-20 | 1794 | ggo-mir-20 |
| 232 | ppa-miR-20 | 1795 | ppa-mir-20 |
| 233 | ptr-miR-20 | 1796 | ptr-mir-20 |
| 234 | ppy-miR-20 | 1797 | ppy-mir-20 |
| 235 | lca-miR-20 | 1798 | lca-mir-20 |
| 236 | cfa-miR-20 | 1799 | cfa-mir-20 |
| 237 | mdo-miR-20 | 1800 | mdo-mir-20 |
| 238 | gga-miR-20a | 1801 | gga-mir-20a |
| 239 | gga-miR-20b | 1802 | gga-mir-20b |
| 240 | xla-miR-20 | 1803 | xla-mir-20 |
| 241 | xtr-miR-20a | 1804 | xtr-mir-20a |
| 242 | xtr-miR-20b | 1805 | xtr-mir-20b |
| 243 | bta-miR-20a | 1806 | bta-mir-20a |
| 244 | bta-miR-20b | 1807 | bta-mir-20b |
| 245 | ssc-miR-20 | 1808 | ssc-mir-20 |
| 246 | dre-miR-20a | 1809 | dre-mir-20a |
| 247 | dre-miR-29b | 1810 | dre-mir-20b |
| 248 | fru-miR-20 | 1811 | fru-mir-20 |
| 249 | tni-miR-20 | 1812 | tni-mir-20 |
| 250 | mmu-miR-21 | 1813 | mmu-mir-21 |

TABLE 3-6

| sequence | | sequence | miRNA |
|---|---|---|---|
| number | miRNA name | number | precursor name |
| 251 | rno-miR-21 | 1814 | rno-mir-21 |
| 252 | cgr-miR-21 | 1815 | cgr-mir-21 |
| 253 | age-miR-21 | 1816 | age-mir-21 |
| 254 | mml-miR-21 | 1817 | mml-mir-21 |
| 255 | mne-miR-21 | 1818 | mne-mir-21 |
| 256 | ggo-miR-21 | 1819 | ggo-mir-21 |
| 257 | ppa-miR-21 | 1820 | ppa-mir-21 |
| 258 | ptr-miR-21 | 1821 | ptr-mir-21 |
| 259 | ppy-miR-21 | 1822 | ppy-mir-21 |
| 260 | cfa-miR-21 | 1823 | cfa-mir-21 |
| 261 | mdo-miR-21 | 1824 | mdo-mir-21 |
| 262 | gga-miR-21 | 1825 | gga-mir-21 |
| 263 | bta-miR-21 | 1826 | bta-mir-21 |
| 264 | ssc-miR-21 | 1827 | ssc-mir-21 |
| 265 | dre-miR-21 | 1828 | dre-mir-21-1 |
| | | 1829 | dre-mir-21-2 |
| 266 | fru-miR-21 | 1830 | fru-mir-21 |
| 267 | tni-miR-21 | 1831 | tni-mir-21 |
| 268 | mmu-miR-24 | 1832 | mmu-mir-24-1 |
| | | 1833 | mmu-mir-24-2 |
| 269 | rno-miR-24 | 1834 | rno-mir-24-1 |
| | | 1835 | rno-mir-24-2 |
| 270 | mml-miR-24 | 1836 | mml-mir-24-1 |
| | | 1837 | mml-mir-24-2 |
| 271 | mne-miR-24 | 1838 | mne-mir-24-1 |
| | | 1839 | mne-mir-24-2 |
| 272 | ggo-miR-24 | 1840 | ggo-mir-24-1 |
| 273 | ppa-miR-24 | 1841 | ppa-mir-24-1 |
| | | 1842 | ppa-mir-24-2 |
| 274 | ptr-miR-24 | 1843 | ptr-mir-24 |
| 275 | ppy-miR-24 | 1844 | ppy-mir-24-1 |
| | | 1845 | ppy-mir-24-2 |
| 276 | cfa-miR-24 | 1846 | cfa-mir-24-1 |
| | | 1847 | cfa-mir-24-2 |
| 277 | mdo-miR-24 | 1848 | mdo-mir-24-1 |
| | | 1849 | mdo-mir-24-2 |
| 278 | gga-miR-24 | 1850 | gga-mir-24 |
| 279 | xtr-miR-24b | 1851 | xtr-mir-24b |
| 280 | bta-miR-24 | 1852 | bta-mir-24 |
| 281 | ssc-miR-24 | 1853 | ssc-mir-24 |
| 282 | dre-miR-24 | 1854 | dre-mir-24-1 |
| | | 1855 | dre-mir-24-2 |
| | | 1856 | dre-mir-24-3 |
| | | 1857 | dre-mir-24-4 |
| 283 | fru-miR-24 | 1858 | fru-mir-24-1 |
| | | 1859 | fru-mir-24-2 |
| 284 | tni-miR-24 | 1860 | tni-mir-24-1 |
| | | 1861 | tni-mir-24-2 |
| 285 | mmu-miR-25 | 1862 | mmu-mir-25 |
| 286 | rno-miR-25 | 1863 | rno-mir-25 |
| 287 | lla-miR-25 | 1864 | lla-mir-25 |
| 288 | mml-miR-25 | 1865 | mml-mir-25 |
| 289 | mne-miR-25 | 1866 | mne-mir-25 |
| 290 | ggo-miR-25 | 1867 | ggo-mir-25 |
| 291 | ppa-miR-25 | 1868 | ppa-mir-25 |
| 292 | ptr-miR-25 | 1869 | ptr-mir-25 |
| 293 | ppy-miR-25 | 1870 | ppy-mir-25 |
| 294 | cfa-miR-25 | 1871 | cfa-mir-25 |
| 295 | mdo-miR-25 | 1872 | mdo-mir-25 |
| 296 | xtr-miR-25 | 1873 | xtr-mir-25-1 |
| | | 1874 | xtr-mir-25-2 |
| 297 | bta-miR-25 | 1875 | bta-mir-25 |
| 298 | dre-miR-25 | 1876 | dre-mir-25 |
| 299 | fru-miR-25 | 1877 | fru-mir-25 |
| 300 | tni-miR-25 | 1878 | tni-mir-25 |

TABLE 3-7

| sequence | | sequence | miRNA |
|---|---|---|---|
| number | miRNA name | number | precursor name |
| 301 | mmu-miR-32 | 1879 | mmu-mir-32 |
| 302 | rno-miR-32 | 1880 | rno-mir-32 |
| 303 | sla-miR-32 | 1881 | sla-mir-32 |
| 304 | mml-miR-32 | 1882 | mml-mir-32 |
| 305 | mne-miR-32 | 1883 | mne-mir-32 |
| 306 | ggo-miR-32 | 1884 | ggo-mir-32 |
| 307 | ppa-miR-32 | 1885 | ppa-mir-32 |
| 308 | ptr-miR-32 | 1886 | ptr-mir-32 |
| 309 | ppy-miR-32 | 1887 | ppy-mir-32 |
| 310 | cfa-miR-32 | 1888 | cfa-mir-32 |
| 311 | mdo-miR-32 | 1889 | mdo-mir-32 |
| 312 | gga-miR-32 | 1890 | gga-mir-32 |
| 313 | ssc-miR-32 | 1891 | ssc-mir-32 |
| 314 | mmu-miR-26b | 1892 | mmu-mir-26b |
| 315 | rno-miR-26a | 1893 | rno-mir-26a |
| 316 | rno-miR-26b | 1894 | rno-mir-26b |
| 317 | lla-miR-26a | 1895 | lla-mir-26a |
| 318 | mml-miR-26a | 1896 | mml-mir-26a-1 |
| | | 1897 | mml-mir-26a-2 |
| 319 | mml-miR-26b | 1898 | mml-mir-26b |
| 320 | mne-miR-26a | 1899 | mne-mir-26a |
| 321 | ggo-miR-26a | 1900 | ggo-mir-26a |
| 322 | ppa-miR-26a | 1901 | ppa-mir-26a |
| 323 | ptr-miR-26a | 1902 | ptr-mir-26a |
| 324 | ppy-miR-26a | 1903 | ppy-mir-26a |
| 325 | cfa-miR-26a | 1904 | cfa-mir-26a-1 |
| | | 1905 | cfa-mir-26a-2 |
| 326 | cfa-miR-26b | 1906 | cfa-mir-26b |
| 327 | gga-miR-26a | 1907 | gga-mir-26a |
| 328 | xtr-miR-26 | 1908 | xtr-mir-26-1 |
| | | 1909 | xtr-mir-26-2 |
| 329 | bta-miR-26a | 1910 | bta-mir-26a |
| 330 | bta-miR-26b | 1911 | bta-mir-26b |
| 331 | ssc-miR-26a | 1912 | ssc-mir-26a |
| 332 | dre-miR-26a | 1913 | dre-mir-26a-1 |
| | | 1914 | dre-mir-26a-2 |
| | | 1915 | dre-mir-26a-3 |
| 333 | dre-miR-26b | 1916 | dre-mir-26b |
| 334 | fru-miR-26 | 1917 | fru-mir-26 |
| 335 | tni-miR-26 | 1918 | tni-mir-26 |
| 336 | rno-miR-30d* | 1919 | rno-mir-30d |
| 337 | rno-miR-30e* | 1920 | rno-mir-30e |
| 338 | mml-miR-30a-3p | 1921 | mml-mir-30a |
| 339 | ggo-miR-30a-3p | 1922 | ggo-mir-30a |
| 340 | ppa-miR-30a-3p | 1923 | ppa-mir-30a |
| 341 | ptr-miR-30a-3p | 1924 | ptr-mir-30a |
| 342 | ppy-miR-30a-3p | 1925 | ppy-mir-30a |
| 343 | cfa-miR-30e | 1926 | cfa-mir-30e |
| 344 | gga-miR-30a-3p | 1927 | gga-mir-30a |
| 345 | xtr-miR-30a-3p | 1928 | xtr-mir-30a |
| 346 | dre-miR-30e* | 1929 | dre-mir-30e-2 |
| 347 | mmu-miR-34a | 1930 | mmu-mir-34a |
| 348 | mmu-miR-34b-5p | 1931 | mmu-mir-34b |
| 349 | rno-miR-34a | 1932 | rno-mir-34a |
| 350 | rno-miR-34c | 1933 | rno-mir-34c |

TABLE 3-8

| sequence | | sequence | miRNA |
|---|---|---|---|
| number | miRNA name | number | precursor name |
| 351 | age-miR-34a | 1934 | age-mir-34a |
| 352 | lla-miR-34a | 1935 | lla-mir-34a |
| 353 | sla-miR-34a | 1936 | sla-mir-34a |
| 354 | mml-miR-34a | 1937 | mml-mir-34a |
| 355 | mml-miR-34c-5p | 1938 | mml-mir-34c |
| 356 | mne-miR-34a | 1939 | mne-mir-34a |
| 357 | ggo-miR-34a | 1940 | ggo-mir-34a |
| 358 | ppa-miR-34a | 1941 | ppa-mir-34a |
| 359 | ptr-miR-34a | 1942 | ptr-mir-34a |
| 360 | ppy-miR-34a | 1943 | ppy-mir-34a |
| 361 | cfa-miR-34a | 1944 | cfa-mir-34a |
| 362 | cfa-miR-34c | 1945 | cfa-mir-34c |
| 363 | mdo-miR-34a | 1946 | mdo-mir-34a |
| 364 | gga-miR-34a | 1947 | gga-mir-34a |
| 365 | gga-miR-34c | 1948 | gga-mir-34c |
| 366 | xtr-miR-34a | 1949 | xtr-mir-34a |
| 367 | bta-miR-34a | 1950 | bta-mir-34a |
| 368 | bta-miR-34b | 1951 | bta-mir-34b |
| 369 | bta-miR-34c | 1952 | bta-mir-34c |
| 370 | dre-miR-34 | 1953 | dre-mir-34 |
| 371 | dre-miR-34c | 1953 | dre-mir-34c |
| 372 | mmu-miR-449a | 1955 | mmu-mir-449a |
| 373 | mmu-miR-449c | 1956 | mmu-mir-449c |
| 374 | rno-miR-449a | 1957 | rno-mir-449a |
| 375 | mml-miR-449a | 1958 | mml-mir-449a |
| 376 | cfa-miR-449 | 1959 | cfa-mir-449 |
| 377 | mdo-miR-449 | 1960 | mdo-mir-449 |
| 378 | gga-miR-449 | 1961 | gga-mir-449 |
| 379 | xtr-miR-449 | 1962 | xtr-mir-449 |
| 380 | mmu-miR-449b | 1963 | mmu-mir-449b |
| 381 | mml-miR-449b | 1964 | mml-mir-449b |
| 382 | mmu-miR-107 | 1964 | mmu-mir-107 |
| 383 | rno-miR-107 | 1966 | rno-mir-107 |
| 384 | lla-miR-107 | 1967 | lla-mir-107 |
| 385 | mml-miR-107 | 1968 | mml-mir-107 |
| 386 | mne-miR-107 | 1969 | mne-mir-107 |
| 387 | ggo-miR-107 | 1970 | ggo-mir-107 |
| 388 | ppa-miR-107 | 1971 | ppa-mir-107 |
| 389 | ptr-miR-107 | 1972 | ptr-mir-107 |
| 390 | ppy-miR-107 | 1973 | ppy-mir-107 |
| 391 | cfa-miR-107 | 1974 | cfa-mir-107 |
| 392 | mdo-miR-107 | 1975 | mdo-mir-107 |
| 393 | gga-miR-107 | 1976 | gga-mir-107 |
| 394 | xtr-miR-107 | 1977 | xtr-mir-107 |
| 395 | bta-miR-107 | 1978 | bta-mir-107 |
| 396 | ssc-miR-107 | 1979 | ssc-mir-107 |
| 397 | dre-miR-107 | 1980 | dre-mir-107 |
| 398 | fru-miR-107 | 1981 | fru-mir-107 |
| 399 | tni-miR-107 | 1982 | tni-mir-107 |
| 400 | ptr-miR-140 | 1983 | ptr-mir-140 |

TABLE 3-9

| sequence | | sequence | miRNA |
|---|---|---|---|
| number | miRNA name | number | precursor name |
| 401 | gga-miR-140 | 1984 | gga-mir-140 |
| 402 | xtr-miR-140 | 1985 | xtr-mir-140 |
| 403 | ssc-miR-140 | 1986 | ssc-mir-140 |
| 404 | mmu-miR-148b | 1987 | mmu-mir-148b |
| 405 | mml-miR-148a | 1988 | mml-mir-148a |
| 406 | mml-miR-148b | 1989 | mml-mir-148b |
| 407 | cfa-miR-148a | 1990 | cfa-mir-148a |
| 408 | cfa-miR-148b | 1991 | cfa-mir-148b |
| 409 | gga-miR-148a | 1992 | gga-mir-148a |
| 410 | xtr-miR-148a | 1993 | xtr-mir-148a |
| 411 | xtr-miR-148b | 1994 | xtr-mir-148b |
| 412 | bta-miR-148a | 1995 | bta-mir-148a |
| 413 | bta-miR-148b | 1996 | bta-mir-148b |
| 414 | ssc-miR-148a | 1997 | ssc-mir-148a |
| 415 | dre-miR-148 | 1998 | dre-mir-148 |
| 416 | fru-miR-148 | 1999 | fru-mir-148 |
| 417 | tni-miR-148 | 2000 | tni-mir-148 |
| 418 | mmu-miR-190 | 2001 | mmu-mir-190 |
| 419 | rno-miR-190 | 2002 | rno-mir-190 |
| 420 | rno-miR-190b | 2003 | rno-mir-190b |
| 421 | mml-miR-190a | 2004 | mml-mir-190a |
| 422 | mml-miR-190b | 2005 | mml-mir-190b |
| 423 | ggo-miR-190 | 2006 | ggo-mir-190 |
| 424 | ppa-miR-190 | 2007 | ppa-mir-190 |
| 425 | ptr-miR-190 | 2008 | ptr-mir-190 |
| 426 | gga-miR-190 | 2009 | gga-mir-190 |
| 427 | dre-miR-190 | 2010 | dre-mir-190 |
| 428 | dre-miR-190b | 2011 | dre-mir-190b |
| 429 | fru-miR-190 | 2012 | fru-mir-190 |
| 430 | tni-miR-190 | 2013 | tni-mir-190 |
| 431 | lla-miR-199a | 2014 | lla-mir-199a |
| 432 | sla-miR-199a | 2015 | sla-mir-199a |
| 433 | mml-miR-199a | 2016 | mml-mir-199a-1 |
| | | 2017 | mml-mir-199a-2 |
| 434 | mne-miR-199a | 2018 | mne-mir-199a |
| 435 | ggo-miR-199a | 2019 | ggo-mir-199a |
| 436 | ppa-miR-199a | 2020 | ppa-mir-199a |
| 437 | ptr-miR-199a | 2021 | ptr-mir-199a |
| 438 | ppy-miR-199a | 2022 | ppy-mir-199a |
| 439 | xtr-miR-199a | 2023 | xtr-mir-199a |
| 440 | dre-miR-199 | 2024 | dre-mir-199-1 |
| | | 2025 | dre-mir-199-2 |
| | | 2026 | dre-mir-199-2 |
| 441 | fru-miR-199 | 2027 | fru-mir-199-1 |
| | | 2028 | fru-mir-199-2 |
| | | 2029 | fru-mir-199-3 |
| 442 | tni-miR-199 | 2030 | tni-mir-199-1 |
| | | 2031 | tni-mir-199-2 |
| | | 2032 | tni-mir-199-3 |
| 443 | mdo-miR-199b | 2033 | mdo-mir-199b |
| 444 | xtr-miR-199b | 2034 | xtr-mir-199b |
| 445 | bta-miR-199b | 2035 | bta-mir-199b |
| 446 | gga-miR-202* | 2036 | gga-mir-202 |
| 447 | xtr-miR-202* | 2037 | xtr-mir-202-1 |
| | | 2038 | xtr-mir-202-2 |
| 448 | mmu-miR-208b | 2039 | mmu-mir-208b |
| 449 | rno-miR-208 | 2040 | rno-mir-208 |
| 450 | mml-miR-208a | 2041 | mml-mir-280a |

TABLE 3-10

| sequence | | sequence | miRNA |
|---|---|---|---|
| number | miRNA name | number | precursor name |
| 451 | mml-miR-208b | 2042 | mml-mir-208b |
| 452 | mdo-miR-208 | 2043 | mdo-mir-208 |
| 453 | xtr-miR-208 | 2044 | xtr-mir-208 |
| 454 | mmu-miR-210 | 2045 | mmu-mir-210 |
| 455 | rno-miR-210 | 2046 | rno-mir-210 |
| 456 | mml-miR-210 | 2047 | mml-mir-210 |
| 457 | xtr-miR-210 | 2048 | xtr-mir-210 |
| 458 | dre-miR-210 | 2049 | dre-mir-210 |
| 459 | fru-miR-210 | 2050 | fru-mir-210 |
| 460 | tni-miR-210 | 2051 | tni-mir-210 |
| 461 | mmu-miR-211 | 2052 | mmu-mir-211 |
| 462 | rno-miR-211 | 2053 | rno-mir-211 |
| 463 | mml-miR-211 | 2054 | mml-mir-211 |
| 464 | mne-miR-211 | 2055 | mne-mir-211 |
| 465 | ppy-miR-211 | 2056 | ppy-mir-211 |
| 466 | gga-miR-211 | 2057 | gga-mir-211 |
| 467 | mmu-miR-214 | 2058 | mmu-mir-214 |
| 468 | rno-miR-214 | 2059 | rno-mir-214 |
| 469 | age-miR-214 | 2060 | age-mir-214 |
| 470 | sla-miR-214 | 2061 | sla-mir-214 |
| 471 | mml-miR-214 | 2062 | mml-mir-214 |
| 472 | mne-miR-214 | 2063 | mne-mir-214 |
| 473 | ggo-miR-214 | 2064 | ggo-mir-214 |
| 474 | ppa-miR-214 | 2065 | ppa-mir-214 |
| 475 | ptr-miR-214 | 2066 | ptr-mir-214 |
| 476 | ppy-miR-214 | 2067 | ppy-mir-214 |
| 477 | mdo-miR-214 | 2068 | mdo-mir-214 |
| 478 | xtr-miR-214 | 2069 | xtr-mir-214 |
| 479 | bta-miR-214 | 2070 | bta-mir-214 |
| 480 | ssc-miR-214 | 2071 | ssc-mir-214 |
| 481 | dre-miR-214 | 2072 | dre-mir-214 |
| 482 | fru-miR-214 | 2073 | fru-mir-214 |
| 483 | tni-miR-214 | 2074 | tni-mir-214 |
| 484 | mmu-miR-218 | 2075 | mmu-mir-218-1 |
| | | 2076 | mmu-mir-218-2 |
| 485 | rno-miR-218 | 2077 | rno-mir-218-1 |
| | | 2078 | rno-mir-218-2 |
| 486 | age-miR-218 | 2079 | age-mir-218 |
| 487 | lla-miR-218 | 2080 | lla-mir-218-1 |
| | | 2081 | lla-mir-218-2 |
| 488 | sla-miR-218 | 2082 | sla-mir-218-1 |
| | | 2083 | sla-mir-218-2 |
| 489 | mml-miR-218 | 2084 | mml-mir-218-1 |
| | | 2085 | mml-mir-218-2 |
| 490 | mne-miR-218 | 2086 | mne-mir-218-1 |
| | | 2087 | mne-mir-218-2 |
| 491 | ggo-miR-218 | 2088 | ggo-mir-218 |
| 492 | ppa-miR-218 | 2089 | ppa-mir-218-1 |
| | | 2090 | ppa-mir-218-2 |
| 493 | ptr-miR-218 | 2091 | ptr-mir-218-1 |
| | | 2092 | ptr-mir-218-2 |
| 494 | ppy-miR-218 | 2093 | ppy-mir-218-1 |
| | | 2094 | ppy-mir-218-2 |
| 495 | lca-miR-218 | 2095 | lca-mir-218 |
| 496 | cfa-miR-218 | 2096 | cfa-mir-218-1 |
| | | 2097 | cfa-mir-218-2 |
| 497 | mdo-miR-218 | 2098 | mdo-mir-218 |
| 498 | gga-miR-218 | 2099 | gga-mir-218-1 |
| | | 2100 | gga-mir-218-2 |
| | | 2101 | gga-mir-218-3 |
| 499 | xtr-miR-218 | 2102 | xtr-mir-218-1 |
| | | 2103 | xtr-mir-218-2 |
| 500 | bta-miR-218 | 2104 | bta-mir-218 |

TABLE 3-11

| sequence | | sequence | miRNA |
|---|---|---|---|
| number | miRNA name | number | precursor name |
| 501 | dre-miR-218b | 2105 | dre-mir-218b |
| 502 | fru-miR-218a | 2106 | fru-mir-218a-1 |
| | | 2107 | fru-mir-218a-2 |
| 503 | fru-miR-218b | 2108 | fru-mir-218b |
| 504 | tni-miR-218a | 2109 | tni-mir-218a-1 |
| | | 2110 | tni-mir-218a-2 |
| 505 | tni-miR-218b | 2111 | tni-mir-218b |
| 506 | mml-miR-299-5p | 2112 | mml-mir-299 |
| 507 | mml-miR-325 | 2113 | mml-mir-325 |
| 508 | ssc-miR-325 | 2114 | ssc-mir-325 |
| 509 | mmu-miR-328 | 2115 | mmu-mir-328 |
| 510 | rno-miR-328 | 2116 | rno-mir-328 |
| 511 | cfa-miR-328 | 2117 | cfa-mir-328 |
| 512 | mmu-miR-329 | 2118 | mmu-mir-329 |
| 513 | rno-miR-329 | 2119 | rno-mir-329 |
| 514 | mml-miR-329 | 2120 | mml-mir-329-1 |
| | | 2121 | mml-mir-329-2 |
| 515 | rno-miR-338 | 2122 | rno-mir-338 |
| 516 | cfa-miR-338 | 2123 | cfa-mir-338 |
| 517 | mdo-miR-338 | 2124 | mdo-mir-338 |
| 518 | xtr-miR-338 | 2125 | xtr-mir-338-1 |
| | | 2126 | xtr-mir-338-2 |
| 519 | dre-miR-338 | 2127 | dre-mir-338-1 |
| | | 2128 | dre-mir-338-2 |
| | | 2129 | dre-mir-338-3 |
| | | 2130 | dre-mir-338-4 |
| 520 | fru-miR-338 | 2131 | fru-mir-338 |
| 521 | tni-miR-338 | 2132 | tni-mir-338 |
| 522 | xtr-miR-425-5p | 2133 | xtr-mir-425 |
| 523 | mmu-miR-484 | 2134 | mmu-mir-484 |
| 524 | rno-miR-484 | 2135 | rno-mir-484 |
| 525 | mml-miR-484 | 2136 | mml-mir-484 |
| 526 | bta-miR-484 | 2137 | bta-mir-484 |
| 527 | mml-miR-485-5p | 2138 | mml-mir-485 |
| 528 | mmu-miR-486 | 2139 | mmu-mir-486 |
| 529 | mml-miR-520b | 2140 | mml-mir-520b |
| 530 | mml-miR-520c | 2141 | mml-mir-520c |
| 531 | mml-miR-520e | 2142 | mml-mir-520e |
| 532 | mml-miR-520f | 2143 | mml-mir-520f |
| 533 | mml-miR-520h | 2144 | mml-mir-520h |
| 534 | mml-miR-522 | 2145 | mml-mir-522 |
| 535 | mml-miR-573 | 2146 | mml-mir-573 |
| 536 | mml-miR-650b | 2147 | mml-mir-650b |
| 537 | mml-miR-650c | 2148 | mml-mir-650c |
| 538 | mml-miR-660 | 2149 | mml-mir-660 |
| 539 | cfa-miR-660 | 2150 | cfa-mir-660 |
| 540 | bta-miR-660 | 2151 | bta-mir-660 |
| 541 | mmu-miR-668 | 2152 | mmu-mir-668 |
| 542 | mml-miR-668 | 2153 | mml-mir-668 |
| 543 | mml-miR-675 | 2154 | mml-mir-675 |
| 544 | mml-miR-765 | 2155 | mml-mir-765 |
| 545 | mmu-miR-194 | 2156 | mmu-mir-194-1 |
| | | 2157 | mmu-mir-194-2 |
| 546 | rno-miR-194 | 2158 | rno-mir-194-1 |
| | | 2159 | rno-mir-194-2 |
| 547 | age-miR-194 | 2160 | age-mir-194 |
| 548 | mml-miR-194 | 2161 | mml-mir-194-1 |
| | | 2162 | mml-mir-194-2 |
| 549 | mne-miR-194 | 2163 | mne-mir-194 |
| 550 | ggo-miR-194 | 2164 | ggo-mir-194 |

TABLE 3-12

| sequence | | sequence | miRNA |
|---|---|---|---|
| number | miRNA name | number | precursor name |
| 551 | ptr-miR-194 | 2165 | ptr-mir-194 |
| 552 | ppy-miR-194 | 2166 | ppy-mir-194 |
| 553 | cfa-miR-194 | 2167 | cfa-mir-194 |
| 554 | gga-miR-194 | 2168 | gga-mir-194 |
| 555 | xtr-miR-194 | 2169 | xtr-mir-194-1 |
| | | 2170 | xtr-mir-194-2 |
| 556 | dre-miR-194b | 2171 | dre-mir-194b |
| 557 | fru-miR-194 | 2172 | fru-mir-194 |
| 558 | tni-miR-194 | 2173 | tni-mir-194 |
| 559 | cfa-miR-500 | 2174 | cfa-mir-500 |
| 560 | mmu-miR-197 | 2175 | mmu-mir-197 |
| 561 | age-miR-197 | 2176 | age-mir-197 |
| 562 | mml-miR-197 | 2177 | mml-mir-197 |
| 563 | mne-miR-197 | 2178 | mne-mir-197 |
| 564 | ppa-miR-197 | 2179 | ppa-mir-197 |
| 565 | ptr-miR-197 | 2180 | ptr-mir-197 |
| 566 | ppy-miR-197 | 2181 | ppy-mir-197 |
| 567 | cfa-miR-197 | 2182 | cfa-mir-197 |
| 568 | mmu-miR-221 | 2183 | mmu-mir-221 |
| 569 | rno-miR-221 | 2184 | rno-mir-221 |
| 570 | mml-miR-221 | 2185 | mml-mir-221 |
| 571 | ggo-miR-221 | 2186 | ggo-mir-221 |
| 572 | ppa-miR-221 | 2187 | ppa-mir-221 |
| 573 | ppy-miR-221 | 2188 | ppy-mir-221 |
| 574 | cfa-miR-221 | 2189 | cfa-mir-221 |
| 575 | mdo-miR-221 | 2190 | mdo-mir-221 |
| 576 | gga-miR-221 | 2191 | gga-mir-221 |
| 577 | xtr-miR-221 | 2192 | xtr-mir-221 |
| 578 | bta-miR-221 | 2193 | bta-mir-221 |
| 579 | dre-miR-221 | 2194 | dre-mir-221 |
| 580 | fru-miR-221 | 2195 | fru-mir-221 |
| 581 | tni-miR-221 | 2196 | tni-mir-221 |
| 582 | mmu-let-7a | 2197 | mmu-let-7a-1 |
| | | 2198 | mmu-let-7a-2 |
| 583 | mmu-let-7b | 2199 | mmu-let-7b |
| 584 | mmu-let-7c | 2200 | mmu-let-7c-1 |
| | | 2201 | mmu-let-7c-2 |
| 585 | mmu-let-7d | 2202 | mmu-let-7d |
| 586 | mmu-let-7e | 2203 | mmu-let-7e |
| 587 | mmu-let-7f | 2204 | mmu-let-7f-1 |
| | | 2205 | mmu-let-7f-2 |
| 588 | mmu-let-7i | 2206 | mmu-let-7i |
| 589 | rno-let-7a | 2207 | rno-let-7a-1 |
| | | 2208 | rno-let-7a-2 |
| 590 | rno-let-7b | 2209 | rno-let-7b |
| 591 | rno-let-7c | 2210 | rno-let-7c-1 |
| | | 2211 | rno-let-7c-2 |
| 592 | rno-let-7d | 2212 | rno-let-7d |
| 593 | rno-let-7e | 2213 | rno-let-7e |
| 594 | rno-let-7f | 2214 | rno-let-7f-1 |
| | | 2215 | rno-let-7f-2 |
| 595 | rno-let-7i | 2216 | rno-let-7i |
| 596 | mml-let-7a | 2217 | mml-let-7a-1 |
| | | 2218 | mml-let-7a-2 |
| | | 2219 | mml-let-7a-3 |
| 597 | mml-let-7b | 2220 | mml-let-7b |
| 598 | mml-let-7c | 2221 | mml-let-7c |
| 599 | mml-let-7d | 2222 | mml-let-7d |
| 600 | mml-let-7e | 2223 | mml-let-7e |

TABLE 3-13

| sequence | | sequence | miRNA |
|---|---|---|---|
| number | miRNA name | number | precursor name |
| 601 | mml-let-7f | 2224 | mml-let-7f-1 |
| | | 2225 | mml-let-7f-2 |
| 602 | mml-let-7g | 2226 | mml-let-7g |
| 603 | mml-let-7i | 2227 | mml-let-7i |
| 604 | cfa-let-7a | 2228 | cfa-let-7a |
| 605 | cfa-let-7c | 2229 | cfa-let-7c |
| 606 | cfa-let-7e | 2230 | cfa-let-7e |
| 607 | cfa-let-7f | 2231 | cfa-let-7f |
| 608 | cfa-let-7g | 2232 | cfa-let-7g |
| 609 | cfa-let-7j | 2233 | cfa-let-7j |
| 610 | mdo-let-7a | 2234 | mdo-let-7a-1 |
| | | 2235 | mdo-let-7a-2 |
| | | 2236 | mdo-let-7a-3 |
| 611 | mdo-let-7b | 2237 | mdo-let-7b |
| 612 | mdo-let-7d | 2238 | mdo-let-7d |
| 613 | mdo-let-7f | 2239 | mdo-let-7f-1 |
| | | 2240 | mdo-let-7f-2 |
| 614 | mdo-let-7g | 2241 | mdo-let-7g |
| 615 | mdo-let-7i | 2242 | mdo-let-7i |
| 616 | gga-let-7a | 2243 | gga-let-7a-1 |
| | | 2244 | gga-let-7a-2 |
| | | 2245 | gga-let-7a-3 |
| 617 | gga-let-7b | 2246 | gga-let-7b |
| 618 | gga-let-7c | 2247 | gga-let-7c |
| 619 | gga-let-7d | 2248 | gga-let-7d |
| 620 | gga-let-7f | 2249 | gga-let-7f |
| 621 | gga-let-7g | 2250 | gga-let-7g |
| 622 | gga-let-7i | 2251 | gga-let-7i |
| 623 | gga-let-7j | 2252 | gga-let-7j |
| 624 | gga-let-7k | 2253 | gga-let-7k |
| 625 | xtr-let-7a | 2254 | xtr-let-7a |
| 626 | xtr-let-7b | 2255 | xtr-let-7b |
| 627 | xtr-let-7c | 2256 | xtr-let-7c |
| 628 | xtr-let-7e | 2257 | xtr-let-7e-1 |
| | | 2258 | xtr-let-7e-2 |
| 629 | xtr-let-7f | 2259 | xtr-let-7f |
| 630 | xtr-let-7g | 2260 | xtr-let-7g |
| 631 | xtr-let-7i | 2261 | xtr-let-7i |
| 632 | bta-let-7a | 2262 | bta-let-7a-1 |
| | | 2263 | bta-let-7a-2 |
| | | 2264 | bta-let-7a-3 |
| 633 | bta-let-7b | 2265 | bta-let-7b |
| 634 | bta-let-7c | 2266 | bta-let-7c |
| 635 | bta-let-7d | 2267 | bta-let-7d |
| 636 | bta-let-7e | 2268 | bta-let-7e |
| 637 | bta-let-7f | 2269 | bta-let-7f-1 |
| | | 2270 | bta-let-7f-2 |
| 638 | bta-let-7g | 2271 | bta-let-7g |
| 639 | bta-let-7i | 2272 | bta-let-7i |
| 640 | ssc-let-7c | 2273 | ssc-let-7c |
| 641 | ssc-let-7f | 2274 | ssc-let-7f |
| 642 | ssc-let-7i | 2275 | ssc-let-7i |
| 643 | dre-let-7a | 2276 | dre-let-7a-1 |
| | | 2277 | dre-let-7a-2 |
| | | 2278 | dre-let-7a-3 |
| | | 2279 | dre-let-7a-4 |
| | | 2280 | dre-let-7a-5 |
| | | 2281 | dre-let-7a-6 |
| 644 | dre-let-7b | 2282 | dre-let-7b |
| 645 | dre-let-7c | 2283 | dre-let-7c-1 |
| | | 2284 | dre-let-7c-2 |
| 646 | dre-let-7d | 2284 | dre-let-7d-1 |
| | | 2286 | dre-let-7d-2 |
| 647 | dre-let-7e | 2287 | dre-let-7e |
| 648 | dre-let-7f | 2288 | dre-let-7f |
| 649 | dre-let-7g | 2289 | dre-let-7g-1 |
| | | 2290 | dre-let-7g-2 |
| 650 | dre-let-7h | 2291 | dre-let-7h |

TABLE 3-14

| sequence | | sequence | miRNA |
|---|---|---|---|
| number | miRNA name | number | precursor name |
| 651 | dre-let-7i | 2292 | dre-let-7i |
| 652 | dre-let-7j | 2293 | dre-let-7j |
| 653 | fru-let-7a | 2294 | fru-let-7a-1 |
| | | 2295 | fru-let-7a-2 |
| | | 2296 | fru-let-7a-3 |
| 654 | fru-let-7b | 2297 | fru-let-7b |
| 655 | fru-let-7d | 2298 | fru-let-7d |
| 656 | fru-let-7e | 2299 | fru-let-7e |
| 657 | fru-let-7g | 2300 | fru-let-7g |
| 658 | fru-let-7h | 2301 | fru-let-7h |
| 659 | fru-let-7i | 2302 | fru-let-7i |
| 660 | fru-let-7j | 2303 | fru-let-7j |
| 661 | tni-let-7a | 2304 | tni-let-7a-1 |
| | | 2305 | tni-let-7a-2 |
| | | 2306 | tni-let-7a-3 |
| 662 | tni-let-7b | 2307 | tni-let-7b |
| 663 | tni-let-7d | 2308 | tni-let-7d |
| 664 | tni-let-7e | 2309 | tni-let-7e |
| 665 | tni-let-7g | 2310 | tni-let-7g |
| 666 | tni-let-7h | 2311 | tni-let-7h |
| 667 | tni-let-7i | 2312 | tni-let-7i |
| 668 | tni-let-7j | 2313 | tni-let-7j |
| 669 | mmu-miR-1 | 2314 | mmu-mir-1-1 |
| | | 2315 | mmu-mir-1-2 |
| | | 2316 | mmu-mir-1-2-as |
| 670 | rno-miR-1 | 2317 | rno-mir-1 |
| 671 | mml-miR-1 | 2318 | mml-mir-1-1 |
| | | 2319 | mml-mir-1-2 |
| 672 | ppa-miR-1 | 2320 | ppa-mir-1 |
| 673 | cfa-miR-1 | 2321 | cfa-mir-1-1 |
| | | 2322 | cfa-mir-1-2 |
| 674 | mdo-miR-1 | 2323 | mdo-mir-1 |
| 675 | gga-miR-1a | 2324 | gga-mir-1a-1 |
| | | 2325 | gga-mir-1a-2 |
| 676 | gga-miR-1b | 2326 | gga-mir-1b |
| 677 | xtr-miR-1b | 2327 | xtr-mir-1b |
| 678 | dre-miR-1 | 2328 | dre-mir-1-1 |
| | | 2329 | dre-mir-1-2 |
| 679 | fru-miR-1 | 2330 | fru-mir-1 |
| 680 | tni-miR-1 | 2331 | tni-mir-1 |
| 681 | mmu-miR-206 | 2332 | mmu-mir-206 |
| 682 | rno-miR-206 | 2333 | rno-mir-206 |
| 683 | mml-miR-206 | 2334 | mml-mir-206 |
| 684 | mne-miR-206 | 2335 | mne-mir-206 |
| 685 | ppy-miR-206 | 2336 | ppy-mir-206 |
| 686 | cfa-miR-206 | 2337 | cfa-mir-206 |
| 687 | mdo-miR-206 | 2338 | mdo-mir-206 |
| 688 | gga-miR-206 | 2339 | gga-mir-206 |
| 689 | xtr-miR-206 | 2340 | xtr-mir-206 |
| 690 | dre-miR-206 | 2341 | dre-mir-206-1 |
| | | 2342 | dre-mir-206-2 |
| 691 | mmu-miR-9 | 2343 | mmu-mir-9-1 |
| | | 2344 | mmu-mir-9-2 |
| | | 2345 | mmu-mir-9-3 |
| 692 | rno-miR-9 | 2346 | rno-mir-9-1 |
| | | 2347 | rno-mir-9-2 |
| | | 2348 | rno-mir-9-3 |
| 693 | age-miR-9 | 2349 | age-mir-9 |
| 694 | lla-miR-9 | 2350 | lla-mir-9 |
| 695 | mml-miR-9 | 2351 | mml-mir-9-1 |
| | | 2352 | mml-mir-9-2 |
| | | 2353 | mml-mir-9-3 |
| 696 | mne-miR-9 | 2354 | mne-mir-9 |
| 697 | ggo-miR-9 | 2355 | ggo-mir-9 |
| 698 | pfr-miR-9 | 2356 | ptr-mir-9 |
| 699 | cfa-miR-9 | 2357 | cfa-mir-9-1 |
| | | 2358 | cfa-mir-9-2 |
| | | 2359 | cfa-mir-9-3 |
| 700 | mdo-miR-9 | 2360 | mdo-mir-9-1 |
| | | 2361 | mdo-mir-9-2 |

TABLE 3-15

| sequence | | sequence | miRNA |
|---|---|---|---|
| number | miRNA name | number | precursor name |
| 701 | gga-miR-9 | 2362 | gga-mir-9-1 |
| | | 2363 | gga-mir-9-2 |
| 702 | xtr-miR-9 | 2364 | xtr-mir-9-3 |
| 703 | xtr-miR-9b | 2365 | xtr-mir-9b |
| 704 | dre-miR-9 | 2366 | dre-mir-9-1 |
| | | 2367 | dre-mir-9-2 |
| | | 2368 | dre-mir-9-3 |
| | | 2369 | dre-mir-9-4 |
| | | 2370 | dre-mir-9-5 |
| | | 2371 | dre-mir-9-6 |
| | | 2372 | dre-mir-9-7 |
| 705 | fru-miR-9 | 2373 | fru-mir-9-1 |
| | | 2374 | fru-mir-9-2 |
| | | 2375 | fru-mir-9-3 |
| | | 2376 | fru-mir-9-4 |
| 706 | tni-miR-9 | 2377 | tni-mir-9-1 |
| | | 2378 | tni-mir-9-2 |
| | | 2379 | tni-mir-9-3 |
| | | 2380 | tni-mir-9-4 |
| 707 | mmu-miR-23b | 2381 | mmu-mir-23b |
| 708 | rno-miR-23a | 2382 | rno-mir-23a |
| 709 | rno-miR-23b | 2383 | rno-mir-23b |
| 710 | age-miR-23a | 2384 | age-mir-23a |
| 711 | sla-miR-23a | 2385 | sla-mir-23a |
| 712 | mml-miR-23a | 2386 | mml-mir-23a |
| 713 | mml-miR-23b | 2387 | mml-mir-23b |
| 714 | mne-miR-23a | 2388 | mne-mir-23a |
| 715 | ggo-miR-23a | 2389 | ggo-mir-23a |
| 716 | ppa-miR-23a | 2390 | ppa-mir-23a |
| 717 | ppa-miR-23b | 2391 | ppa-mir-23b |
| 718 | ptr-miR-23a | 2392 | ptr-mir-23a |
| 719 | ptr-miR-23b | 2393 | ptr-mir-23b |
| 720 | ppy-miR-23a | 2394 | ppy-mir-23a |
| 721 | ppy-miR-23b | 2395 | ppy-mir-23b |
| 722 | lca-miR-23a | 2396 | lca-mir-23a |
| 723 | cfa-miR-23a | 2397 | cfa-mir-23a |
| 724 | cfa-miR-23b | 2398 | cfa-mir-23b |
| 725 | mdo-miR-23a | 2399 | mdo-mir-23a |
| 726 | mdo-miR-23b | 2400 | mdo-mir-23b |
| 727 | gga-miR-23b | 2401 | gga-mir-23b |
| 728 | xtr-miR-23a | 2402 | xtr-mir-23a-1 |
| | | 2403 | xtr-mir-23a-2 |
| 729 | xtr-miR-23b | 2404 | xtr-mir-23b |
| 730 | bta-miR-23e | 2405 | bta-mir-23a |
| 731 | bta-miR-23b | 2406 | bta-mir-23b |
| 732 | ssc-miR-23a | 2407 | ssc-mir-23a |
| 733 | dre-miR-23a | 2408 | dre-mir-23a-1 |
| | | 2409 | dre-mir-23a-2 |
| | | 2410 | dre-mir-23a-3 |
| 734 | dre-miR-23a | 2411 | dre-mir-23b |
| 735 | fru-miR-23a | 2412 | fru-mir-23a-1 |
| | | 2413 | fru-mir-23a-2 |
| | | 2414 | fru-mir-23a-3 |
| 736 | fru-miR-23b | 2415 | fru-mir-23b |
| 737 | tni-miR-23a | 2416 | tni-mir-23a-1 |
| | | 2417 | tni-mir-23a-2 |
| | | 2418 | tni-mir-23a-3 |
| 738 | tni-miR-23b | 2419 | tni-mir-23b |
| 739 | mmu-miR-27b | 2420 | mmu-mir-27b |
| 740 | rno-miR-27a | 2421 | rno-mir-27a |
| 741 | rno-miR-27b | 2422 | rno-mir-27b |
| 742 | age-miR-27a | 2423 | age-mir-27a |
| 743 | sla-miR-27a | 2424 | sla-mir-27a |
| 744 | mml-miR-27a | 2425 | mml-mir-27a |
| 745 | mml-miR-27b | 2426 | mml-mir-27a |
| 746 | mne-miR-27a | 2427 | mne-mir-27a |
| 747 | ggo-miR-27a | 2428 | ggo-mir-27a |
| 748 | ppa-miR-27a | 2429 | ppa-mir-27a |
| 749 | ptr-miR-27a | 2430 | ptr-mir-27a |
| 759 | ppy-miR-27a | 2431 | ppy-mir-27a |

TABLE 3-16

| sequence | | sequence | |
|---|---|---|---|
| number | miRNA name | number | miRNA precursor name |
| 751 | lca-miR-27a | 2432 | lca-mir-27a |
| 752 | cfa-miR-27a | 2433 | cfa-mir-27a |
| 753 | cfa-miR-27b | 2434 | cfa-mir-27b |
| 754 | mdo-miR-27a | 2435 | mdo-mir-27a |
| 755 | mdo-miR-27b | 2436 | mdo-mir-27b |
| 756 | gga-miR-27b | 2437 | gga-mir-27b |
| 757 | xtr-miR-27a | 2438 | xtr-mir-27a |
| 758 | xtr-miR-27b | 2439 | xtr-mir-27b |
| 759 | xtr-miR-27c | 2440 | xtr-mir-27c-1 |
| | | 2441 | xtr-mir-27c-2 |
| 760 | bta-miR-27a | 2442 | bta-mir-27a |
| 761 | bta-miR-27b | 2443 | bta-mir-27b |
| 762 | ssc-miR-27a | 2444 | ssc-mir-27a |
| 763 | dre-miR-27a | 2445 | dre-mir-27a |
| 764 | dre-miR-27b | 2446 | dre-mir-27b |
| 765 | dre-miR-27c | 2447 | dre-mir-27c |
| 766 | dre-miR-27d | 2448 | dre-mir-27d |
| 767 | dre-miR-27e | 2449 | dre-mir-27e |
| 768 | fru-miR-27b | 2450 | fru-mir-27b |
| 769 | fru-miR-27c | 2451 | fru-mir-27c |
| 770 | fru-miR-27e | 2452 | fru-mir-27e |
| 771 | tni-miR-27b | 2453 | tni-mir-27b |
| 772 | tni-miR-27c | 2454 | tni-mir-27c |
| 773 | tni-miR-27e | 2455 | tni-mir-27e |
| 774 | mmu-miR-28 | 2456 | mmu-mir-28 |
| 775 | rno-miR-28 | 2457 | rno-mir-28 |
| 776 | age-miR-28 | 2458 | age-mir-28 |
| 777 | lla-miR-28 | 2459 | lla-mir-28 |
| 778 | sla-miR-28 | 2460 | sla-mir-28 |
| 779 | mml-miR-28 | 2461 | mml-mir-28 |
| 780 | mne-miR-28 | 2462 | mne-mir-28 |
| 781 | ggo-miR-28 | 2463 | ggo-mir-28 |
| 782 | ppa-miR-28 | 2464 | ppa-mir-28 |
| 783 | ptr-miR-28 | 2465 | ptr-mir-28 |
| 784 | ppy-miR-28 | 2466 | ppy-mir-28 |
| 785 | ssc-miR-28 | 2467 | ssc-mir-28 |
| 786 | mml-miR-31 | 2468 | mml-mir-31 |
| 787 | mne-miR-31 | 2469 | mne-mir-31 |
| 788 | ggo-miR-31 | 2470 | ggo-mir-31 |
| 789 | ppa-miR-31 | 2471 | ppa-mir-31 |
| 790 | ptr-miR-31 | 2472 | ptr-mir-31 |
| 791 | ppy-miR-31 | 2473 | ppy-mir-31 |
| 792 | dre-miR-31 | 2474 | dre-mir-31 |
| 793 | rno-miR-33 | 2475 | rno-mir-33 |
| 794 | mml-miR-33a | 2476 | mml-mir-33a |
| 795 | mml-miR-33b | 2477 | mml-mir-33b |
| 796 | mne-miR-33 | 2478 | mne-mir-33 |
| 797 | ggo-miR-33 | 2479 | ggo-mir-33 |
| 798 | ppa-miR-33 | 2480 | ppa-mir-33 |
| 799 | ptr-miR-33 | 2481 | ptr-mir-33 |
| 800 | ppy-miR-33 | 2482 | ppy-mir-33 |

TABLE 3-17

| sequence | | sequence | |
|---|---|---|---|
| number | miRNA name | number | miRNA precursor name |
| 801 | cfa-miR-33 | 2483 | cfa-mir-33 |
| 802 | gga-miR-33 | 2484 | gga-mir-33 |
| 803 | xtr-miR-33a | 2485 | xtr-mir-33a |
| 804 | xtr-miR-33b | 2486 | xtr-mir-33b |
| 805 | mmu-miR-96 | 2481 | mmu-mir-96 |
| 806 | rno-miR-96 | 2488 | rno-mir-96 |
| 807 | sla-miR-96 | 2489 | sla-mir-96 |
| 808 | mml-miR-96 | 2490 | mml-mir-96 |
| 809 | mne-miR-96 | 2491 | mne-mir-96 |
| 810 | ggo-miR-96 | 2492 | ggo-mir-96 |
| 811 | ppa-miR-96 | 2493 | ppa-mir-96 |
| 812 | ptr-miR-96 | 2494 | ptr-mir-96 |
| 813 | mdo-miR-96 | 2495 | mdo-mir-96 |
| 814 | xtr-miR-96 | 2496 | xtr-mir-96 |
| 815 | dre-miR-96 | 2497 | dre-mir-96 |
| 816 | fru-miR-96 | 2498 | fru-mir-96 |
| 817 | tni-miR-96 | 2499 | tni-mir-96 |
| 818 | mmu-miR-100 | 2500 | mmu-mir-100 |
| 819 | rno-miR-100 | 2501 | rno-mir-100 |
| 820 | age-miR-100 | 2502 | age-mir-100 |
| 821 | lla-miR-100 | 2503 | lla-mir-100 |
| 822 | sla-miR-100 | 2504 | sla-mir-100 |
| 823 | mml-miR-100 | 2505 | mml-mir-100 |
| 824 | ggo-miR-100 | 2506 | ggo-mir-100 |
| 825 | ppa-miR-100 | 2507 | ppa-mir-100 |
| 826 | ptr-miR-100 | 2501 | ptr-mir-100 |
| 827 | ppy-miR-100 | 2509 | ppy-mir-100 |
| 828 | mdo-miR-100 | 2510 | mdo-mir-100 |
| 829 | gga-miR-100 | 2511 | gga-mir-100 |
| 830 | xtr-miR-100 | 2512 | xtr-mir-100 |
| 831 | dre-miR-100 | 2513 | dre-mir-100-1 |
| | | 2514 | dre-mir-100-2 |
| 832 | fru-miR-100 | 2515 | fru-mir-100 |
| 833 | tni-miR-100 | 2516 | tni-mir-100 |
| 834 | mmu-miR-106a | 2517 | mmu-mir-106a |
| 835 | rno-miR-106b | 2518 | rno-mir-106b |
| 836 | age-miR-106a | 2519 | age-mir-106a |
| 837 | age-miR-106b | 2520 | age-mir-106b |
| 838 | lla-miR-106b | 2521 | lla-mir-106b |
| 839 | sla-miR-106a | 2522 | sla-mir-106a |
| 840 | sla-miR-106b | 2523 | sla-mir-106b |
| 841 | mml-miR-106a | 2524 | mml-mir-106a |
| 842 | mml-miR-106b | 2525 | mml-mir-106b |
| 843 | mne-miR-106a | 2526 | mne-mir-106a |
| 844 | mne-miR-106b | 2527 | mne-mir-106b |
| 845 | ggo-miR-106a | 2528 | ggo-mir-106a |
| 846 | ggo-miR-106b | 2529 | ggo-mir-106b |
| 847 | ppa-miR-106a | 2530 | ppa-mir-106a |
| 848 | ppa-miR-106b | 2531 | ppa-mir-106b |
| 849 | ptr-miR-106a | 2532 | ptr-mir-106a |
| 850 | ptr-miR-106b | 2533 | ptr-mir-106b |

TABLE 3-18

| sequence | | sequence | |
|---|---|---|---|
| number | miRNA name | number | miRNA precursor name |
| 851 | ppy-miR-106a | 2534 | ppy-mir-106a |
| 852 | ppy-miR-106b | 2535 | ppy-mir-106b |
| 853 | cfa-miR-106b | 2536 | cfa-mir-106b |
| 854 | gga-miR-106 | 2537 | gga-mir-106 |
| 855 | xtr-miR-106 | 2538 | xtr-mir-106 |
| 856 | bta-miR-106 | 2539 | bta-mir-106 |
| 857 | ssc-miR-106a | 2540 | ssc-mir-106a |
| 858 | rno-miR-126* | 2541 | rno-mir-126 |
| 859 | gga-miR-126* | 2542 | gga-mir-126 |
| 860 | xtr-miR-126* | 2543 | xtr-mir-126 |
| 861 | bta-miR-126* | 2544 | bta-mir-126 |
| 862 | dre-miR-126* | 2545 | dre-mir-126 |
| 863 | mmu-miR-127 | 2546 | mmu-mir-127 |
| 864 | rno-miR-127 | 2547 | rno-mir-127 |
| 865 | age-miR-127 | 2548 | age-mir-127 |
| 866 | lla-miR-127 | 2549 | lla-mir-127 |
| 867 | sla-miR-127 | 2550 | sla-mir-127 |
| 868 | mml-miR-127 | 2551 | mml-mir-127 |
| 869 | mne-miR-127 | 2552 | mne-mir-127 |
| 870 | ptr-miR-127 | 2553 | ptr-mir-127 |
| 871 | ppy-miR-127 | 2554 | ppy-mir-127 |
| 872 | cfa-miR-127 | 2555 | cfa-mir-127 |
| 873 | bta-MIR-127 | 2556 | bta-mir-127 |
| 874 | rno-miR-128 | 2557 | rno-mir-128-1 |
| | | 2558 | rno-mir-128-2 |
| 875 | age-miR-128 | 2559 | age-mir-128 |
| 876 | sla-miR-128 | 2560 | sla-mir-128 |
| 877 | mml-miR-128a | 2561 | mml-mir-128a |
| 878 | mml-miR-128b | 2562 | mml-mir-128b |
| 879 | ppa-miR-128 | 2563 | ppa-mir-128 |
| 880 | ptr-miR-128 | 2564 | ptr-mir-128 |
| 881 | ppy-miR-128 | 2565 | ppy-mir-128 |
| 882 | cfa-mir-128 | 2566 | cfa-mir-128-1 |
| | | 2567 | cfa-mir-128-2 |
| 883 | mdo-miR-128 | 2568 | mdo-mir-128 |
| 884 | gga-mir-128 | 2569 | gga-mir-128-1 |
| | | 2570 | gga-mir-128-2 |
| 885 | xtr-mir-128 | 2571 | xtr-mir-128-1 |
| | | 2572 | xtr-mir-128-2 |
| 886 | bta-miR-128 | 2573 | bta-mir-128 |
| 887 | ssc-miR-128 | 2574 | ssc-mir-128 |
| 888 | dre-miR-128 | 2575 | dre-mir-128-1 |
| | | 2576 | dre-mir-128-2 |
| 889 | fru-mir-128 | 2577 | fru-mir-128-1 |
| | | 2578 | fru-mir-128-2 |
| 890 | tni-mir-128 | 2579 | tni-mir-128-1 |
| | | 2580 | tni-mir-128-2 |
| 891 | rno-miR-129 | 2581 | rno-mir-129-1 |
| | | 2582 | rno-mir-129-2 |
| 892 | cfa-miR-129 | 2583 | cfa-mir-129-1 |
| | | 2584 | cfa-mir-129-2 |
| 893 | mdo-miR-129 | 2585 | mdo-mir-129 |
| 894 | xtr-mir-129 | 2586 | xtr-mir-129-1 |
| | | 2587 | xtr-mir-129-2 |
| 895 | dre-miR-129 | 2588 | dre-mir-129-1 |
| | | 2589 | dre-mir-129-2 |
| 896 | fru-miR-129 | 2590 | fru-mir-129-1 |
| | | 2591 | fru-mir-129-2 |
| 897 | tni-mir-129 | 2592 | tni-mir-129-1 |
| | | 2593 | tni-mir-129-2 |
| 898 | age-miR-133a | 2594 | age-mir-133a |
| 899 | lla-miR-133a | 2595 | lla-mir-133a |
| 900 | sia-miR-133a | 2596 | sla-mir-133a |

TABLE 3-19

| sequence | | sequence | miRNA |
|---|---|---|---|
| number | miRNA name | number | precursor name |
| 901 | mne-miR-133a | 2597 | mne-mir-133a |
| 902 | ggo-miR-133a | 2598 | ggo-mir-133a |
| 903 | ppa-miR-133a | 2599 | ppa-mir-133a |
| 904 | ptr-miR-133a | 2600 | ptr-mir-133a |
| 905 | mdo-miR-133a | 2601 | mdo-mir-133a |
| 906 | gga-miR-133a | 2602 | gga-mir-133a-1 |
| | | 2603 | gga-mir-133a-2 |
| 907 | gga-miR-133c | 2604 | gga-mir-133c |
| 908 | xla-miR-133a | 2605 | xla-mir-133a |
| 909 | xtr-miR-133a | 2606 | xtr-mir-133a |
| 910 | xtr-miR-133d | 2607 | xtr-mir-133d |
| 911 | gga-miR-133b | 2608 | gga-mir-133b |
| 912 | xtr-miR-133b | 2609 | xtr-mir-133b |
| 913 | mmu-miR-135b | 2610 | mmu-mir-135b |
| 914 | rno-miR-135a | 2611 | rno-mir-135a |
| 915 | rno-miR-135b | 2612 | rno-mir-135b |
| 916 | age-miR-135 | 2613 | age-mir-135-1 |
| | | 2614 | age-mir-135-2 |
| 917 | lla-miR-135 | 2615 | lla-mir-135-1 |
| | | 2616 | lla-mir-135-2 |
| 918 | mml-miR-135a | 2617 | mml-mir-135a-1 |
| | | 2618 | mml-mir-135a-2 |
| 919 | mml-miR-135b | 2619 | mml-mir-135b |
| 920 | ggo-miR-135 | 2620 | ggo-mir-135 |
| 921 | ppa-miR-135 | 2621 | ppa-mir-135-1 |
| | | 2622 | ppa-mir-135-2 |
| 922 | ptr-miR-135 | 2623 | ptr-mir-135 |
| 923 | ppy-miR-135 | 2624 | ppy-mir-135 |
| 924 | mdo-miR-135a | 2625 | mdo-mir-135a |
| 925 | mdo-miR-135b | 2626 | mdo-mir-135b |
| 926 | gga-miR-135a | 2627 | gga-mir-135a-1 |
| | | 2628 | gga-mir-135a-2 |
| | | 2629 | gga-mir-135a-3 |
| 927 | xtr-miR-135 | 2630 | xtr-mir-135-1 |
| | | 2631 | xtr-mir-135-2 |
| 928 | ssc-miR-135 | 2632 | ssc-mir-135-1 |
| | | 2633 | ssc-mir-135-2 |
| 929 | dre-miR-135a | 2634 | dre-mir-135a |
| 930 | dre-miR-135b | 2635 | dre-mir-135b |
| 931 | dre-miR-135c | 2636 | dre-mir-135c-1 |
| | | 2637 | dre-mir-135c-2 |
| | | 2638 | dre-mir-135c-3 |
| 932 | fru-miR-135a | 2639 | fru-mir-135a |
| 933 | fru-miR-135b | 2640 | fru-mir-135b |
| 934 | tni-miR-135a | 2641 | tni-mir-135a |
| 935 | tni-miR-135b | 2642 | tni-mir-135b |
| 936 | mmu-miR-136 | 2643 | mmu-nir-136 |
| 937 | rno-miR-136 | 2644 | rno-mir-136 |
| 938 | mml-miR-136 | 2645 | mml-mir-136 |
| 939 | ggo-miR-136 | 2646 | ggo-mir-136 |
| 940 | ppa-miR-136 | 2647 | ppa-mir-136 |
| 941 | ptr-miR-136 | 2648 | ptr-mir-136 |
| 942 | ppy-miR-136 | 2649 | ppy-mir-136 |
| 943 | cfa-miR-136 | 2650 | cfa-mir-136 |
| 944 | oar-miR-136 | 2651 | oar-mir-136 |
| 945 | ssc-miR-136 | 2652 | ssc-mir-136 |
| 946 | mmu-miR-142-5p | 2653 | mmu-mir-142 |
| 947 | rno-miR-142-5p | 2654 | rno-mir-142 |
| 948 | mml-miR-142-5p | 2655 | mml-mir-142 |
| 949 | xtr-miR-142-5p | 2656 | xtr-mir-142-1 |
| | | 2657 | xtr-mir-142-2 |
| 950 | dre-miR-142b-5p | 2658 | dre-mir-142b |

TABLE 3-20

| sequence | | sequence | miRNA |
|---|---|---|---|
| number | miRNA name | number | precursor name |
| 951 | fru-miR-142a | 2659 | fru-mir-142a |
| 952 | fru-miR-142b | 2660 | fru-mir-142b |
| 953 | tni-miR-142a | 2661 | tni-mir-142a |
| 954 | tni-miR-142b | 2662 | tni-mir-142b |
| 955 | mmu-miR-146a | 2663 | mmu-mir-146a |
| 956 | rno-miR-146a | 2664 | rno-mir-146a |
| 957 | mml-miR-146a | 2665 | mml-mir-146a |
| 958 | cfa-miR-146a | 2666 | cfa-mir-146a |
| 959 | gga-miR-146a | 2667 | gga-mir-146a |
| 960 | dre-miR-146a | 2668 | dre-mir-146a |
| 961 | mmu-miR-146b | 2669 | mmu-mir-146b |
| 962 | rno-miR-146b | 2670 | rno-mir-146b |
| 963 | cfa-miR-146b | 2671 | cfa-mir-146b |
| 964 | gga-miR-146b | 2672 | gga-mir-146b |
| 965 | xtr-miR-146b | 2673 | xtr-mir-146b |
| 966 | dre-miR-146b | 2674 | dre-mir-146b-1 |
| | | 2675 | dre-mir-146b-2 |
| 967 | mmu-miR-181a | 2676 | mmu-mir-181a-1 |
| | | 2677 | mmu-mir-181a-2 |
| 968 | mmu-miR-181c | 2678 | mmu-mir-181c |
| 969 | mmu-miR-181d | 2679 | mmu-mir-181d |
| 970 | rno-miR-181a | 2680 | rno-mir-181a-1 |
| | | 2681 | rno-mir-181a-2 |
| 971 | rno-miR-181b | 2682 | rno-mir-181b-1 |
| | | 2683 | rno-mir-181b-2 |
| 972 | rno-miR-181c | 2684 | rno-mir-181c |
| 973 | rno-miR-181d | 2685 | rno-mir-181d |
| 974 | lla-miR-181a | 2686 | lla-mir-181a-1 |
| 975 | lla-miR-181b | 2687 | lla-mir-181b |
| 976 | sla-miR-181a | 2688 | sla-mir-181a-2 |
| 977 | mml-miR-181a | 2689 | mml-mir-181a-1 |
| | | 2690 | mml-mir-181a-2 |
| 978 | mml-miR-181b | 2691 | mml-mir-181b-1 |
| | | 2692 | mml-mir-181b-2 |
| 979 | mml-miR-181c | 2693 | mml-mir-181c |
| 980 | mml-miR-181d | 2694 | mml-mir-181d |
| 981 | mne-miR-181a | 2695 | mne-mir-181a-1 |
| | | 2696 | mne-mir-181a-2 |
| 982 | mne-miR-181b | 2697 | mne-mir-181b |
| 983 | ggo-miR-181a | 2698 | ggo-mir-181a-1 |
| | | 2699 | ggo-mir-181a-2 |
| 984 | ggo-MiR-181b | 2700 | ggo-mir-181b |
| 985 | ggo-miR-181c | 2701 | ggo-mir-181c |
| 986 | ppa-miR-181a | 2702 | ppa-mir-181a-1 |
| | | 2703 | ppa-mir-181a-2 |
| 987 | ppa-miR-181b | 2704 | ppa-mir-181b |
| 988 | ppa-miR-181c | 2705 | ppa-mir-181c |
| 989 | ptr-miR-181a | 2706 | ptr-mir-181a-1 |
| | | 2707 | ptr-mir-181a-2 |
| 990 | ptr-miR-181b | 2708 | ptr-mir-181b |
| 991 | ptr-miR-181c | 2709 | ptr-mir-181c |
| 992 | ppy-miR-181a | 2710 | ppy-mir-181a-1 |
| 993 | ppy-miR-181b | 2711 | ppy-mir-181b |
| 994 | cfa-miR-181a | 2712 | cfa-mir-181a-1 |
| | | 2713 | cfa-mir-181a-2 |
| 995 | cfa-miR-181b | 2714 | cfa-mir-181b-1 |
| | | 2715 | cfa-mir-181b-2 |
| 996 | cfa-miR-181c | 2716 | cfa-mir-181c |
| 997 | cfa-miR-181d | 2717 | cfa-mir-181d |
| 998 | mdo-miR-181a | 2718 | mdo-mir-181a |
| 999 | mdo-miR-181b | 2719 | mdo-mir-181b |
| 1000 | mdo-miR-181c | 2720 | mdo-mir-181c |

TABLE 3-21

| sequence | | sequence | |
|---|---|---|---|
| number | miRNA name | number | miRNA precursor name |
| 1001 | gga-miR-181a | 2721 | gga-mir-181a-1 |
| | | 2722 | gga-mir-181a-2 |
| 1002 | gga-miR-181b | 2723 | gga-mir-181b-1 |
| | | 2724 | gga-mir-181b-2 |
| 1003 | xtr-miR-181a | 2725 | xtr-mir-181a-1 |
| | | 2726 | xtr-mir-181a-2 |
| 1004 | xtr-miR-181b | 2727 | xtr-mir-181b-1 |
| | | 2728 | xtr-mir-181b-2 |
| 1005 | bta-miR-181a | 2729 | bta-mir-181a |
| 1006 | bta-miR-181b | 2730 | bta-mir-181b |
| 1007 | bta-miR-181c | 2731 | bta-mir-181c |
| 1008 | ssc-miR-181b | 2732 | ssc-mir-181b |
| 1009 | ssc-miR-181c | 2733 | ssc-mir-181c |
| 1010 | dre-miR-181a | 2734 | dre-mir-181a-1 |
| | | 2735 | dre-mir-181a-2 |
| 1011 | dre-miR-181b | 2736 | dre-mir-181b-1 |
| | | 2737 | dre-mir-181b-2 |
| 1012 | dre-miR-181c | 2738 | dre-mir-181c |
| 1013 | fru-miR-181a | 2739 | fru-mir-181a-1 |
| | | 2740 | fru-mir-181a-2 |
| 1014 | fru-miR-181b | 2741 | fru-mir-181b-1 |
| | | 2742 | fru-mir-181b-2 |
| 1015 | tni-miR-181a | 2743 | tni-mir-181a-1 |
| | | 2744 | tni-mir-181a-2 |
| 1016 | tni-miR-181b | 2745 | tni-mir-181b-1 |
| | | 2746 | tni-mir-181b-2 |
| 1017 | xtr-miR-182* | 2747 | xtr-mir-182 |
| 1018 | dre-miR-182* | 2748 | dre-mir-182 |
| 1019 | mrnu-miR-183 | 2749 | mmu-mir-183 |
| 1020 | rno-miR-183 | 2750 | rno-mir-183 |
| 1021 | sla-miR-183 | 2751 | sla-mir-183 |
| 1022 | mml-miR-183 | 2752 | mml-mir-183 |
| 1023 | mne-miR-183 | 2753 | mne-mir-183 |
| 1024 | ggo-miR-183 | 2754 | ggo-mir-183 |
| 1025 | ppa-miR-183 | 2755 | ppa-mir-183 |
| 1026 | ptr-miR-183 | 2756 | ptr-mir-183 |
| 1027 | cfa-miR-183 | 2757 | cfa-mir-183 |
| 1028 | mdo-miR-183 | 2758 | mdo-mir-183 |
| 1029 | gga-miR-183 | 2759 | gga-mir-183 |
| 1030 | xtr-miR-183 | 2760 | xtr-mir-183 |
| 1031 | ssc-miR-183 | 2761 | ssc-mir-183 |
| 1032 | dre-miR-183 | 2762 | dre-mir-183 |
| 1033 | fru-miR-183 | 2763 | fru-mir-183 |
| 1034 | tni-miR-183 | 2764 | tni-mir-183 |
| 1035 | mmu-miR-187 | 2765 | mmu-mir-187 |
| 1036 | rno-miR-187 | 2766 | rno-mir-187 |
| 1037 | mml-miR-187 | 2767 | mml-mir-187 |
| 1038 | mne-miR-187 | 2768 | mne-mir-187 |
| 1039 | ggo-miR-187 | 2769 | ggo-mir-187 |
| 1040 | ppa-miR-187 | 2770 | ppa-mir-187 |
| 1041 | ppy-miR-187 | 2771 | ppy-mir-187 |
| 1042 | mdo-miR-187 | 2772 | mdo-mir-187 |
| 1043 | gga-miR-187 | 2773 | gga-mir-187 |
| 1044 | xtr-miR-187 | 2774 | xtr-mir-187 |
| 1045 | dre-miR-187 | 2775 | dre-mir-187 |
| 1046 | fru-miR-187 | 2776 | fru-mir-187 |
| 1047 | tni-miR-187 | 2777 | tni-mir-187 |
| 1048 | mmu-miR-192 | 2778 | mmu-mir-192 |
| 1049 | rno-miR-192 | 2779 | rno-mir-192 |
| 1050 | mml-miR-192 | 2780 | mml-mir-192 |

TABLE 3-22

| sequence | | sequence | |
|---|---|---|---|
| number | miRNA name | number | miRNA precursor name |
| 1051 | cfa-miR-192 | 2781 | cfa-mir-192 |
| 1052 | xtr-miR-192 | 2782 | xtr-mir-192 |
| 1053 | bta-miR-192 | 2783 | bta-mir-192 |
| 1054 | dre-miR-192 | 2784 | dre-mir-192 |
| 1055 | fru-miR-192 | 2785 | fru-mir-192 |
| 1056 | tni-miR-192 | 2786 | tni-mir-192 |
| 1057 | mmu-miR-215 | 2787 | mmu-mir-215 |
| 1058 | rno-miR-215 | 2788 | rno-mir-215 |
| 1059 | mml-miR-215 | 2789 | mml-mir-215 |
| 1060 | mne-miR-215 | 2790 | mne-mir-215 |
| 1061 | ggo-miR-215 | 2791 | ggo-mir-215 |
| 1062 | ptr-miR-215 | 2792 | ptr-mir-215 |
| 1063 | ppy-miR-215 | 2793 | ppy-mir-215 |
| 1064 | gga-miR-215 | 2794 | gga-mir-215 |
| 1065 | xtr-miR-215 | 2795 | xtr-mir-215 |
| 1066 | bta-miR-215 | 2796 | bta-mir-215 |
| 1067 | mmu-miR-200a* | 2797 | mmu-mir-200a |
| 1068 | mdo-miR-200a* | 2798 | mdo-mir-200a |
| 1069 | rno-miR-216a | 2799 | rno-mir-216a |
| 1070 | mml-miR-216a | 2800 | mml-mir-216a |
| 1071 | ggo-miR-216 | 2801 | ggo-mir-216 |
| 1072 | ppa-miR-216 | 2802 | ppa-mir-216 |
| 1073 | ppy-miR-216 | 2803 | ppy-mir-216 |
| 1074 | lca-miR-216 | 2804 | lca-mir-216 |
| 1075 | mdo-miR-216 | 2805 | mdo-mir-216 |
| 1076 | gga-miR-216 | 2806 | gga-mir-216 |
| 1077 | xtr-miR-216 | 2807 | xtr-mir-216 |
| 1078 | ssc-miR-216 | 2808 | ssc-mir-216 |
| 1079 | dre-miR-216a | 2809 | dre-mir-216a-1 |
| | | 2810 | dre-mir-216a-2 |
| 1080 | fru-miR-216a | 2811 | fru-mir-216a |
| 1081 | tui-miR-216a | 2812 | tni-mir-216a |
| 1082 | mmu-miR-217 | 2813 | mmu-mir-217 |
| 1083 | rno-miR-217 | 2814 | rno-mir-217 |
| 1084 | ggo-miR-217 | 2815 | ggo-mir-217 |
| 1085 | ppa-miR-217 | 2816 | ppa-mir-217 |
| 1086 | mdo-miR-217 | 2817 | mdo-mir-217 |
| 1087 | gga-miR-217 | 2818 | gga-mir-217 |
| 1088 | xtr-miR-217 | 2819 | xtr-mir-217 |
| 1089 | ssc-miR-217 | 2820 | ssc-mir-217 |
| 1090 | dre-miR-217 | 2821 | dre-mir-217-1 |
| | | 2822 | dre-mir-217-2 |
| 1091 | fru-miR-217 | 2823 | fru-mir-217 |
| 1092 | tni-miR-217 | 2824 | tni-mir-217 |
| 1093 | ggo-miR-220 | 2825 | ggo-mir-220 |
| 1094 | ppa-miR-220 | 2826 | ppa-mir-220 |
| 1095 | ptr-miR-220 | 2827 | ptr-mir-220 |
| 1096 | mmu-miR-222 | 2828 | mmu-mir-222 |
| 1097 | rno-miR-222 | 2829 | rno-mir-222 |
| 1098 | age-miR-222 | 2830 | age-mir-222 |
| 1099 | mml-miR-222 | 2831 | mml-mir-222 |
| 1100 | gga-miR-222 | 2832 | gga-mir-222 |

TABLE 3-23

| sequence | | sequence | miRNA |
|---|---|---|---|
| number | miRNA name | number | precursor name |
| 1101 | xtr-miR-222 | 2833 | xtr-mir-222 |
| 1102 | bta-miR-222 | 2834 | bta-mir-222 |
| 1103 | dre-miR-222 | 2835 | dre-mir-222 |
| 1104 | fru-miR-222 | 2836 | fru-mire-222 |
| 1105 | tni-miR-222 | 2837 | tni-mir-222 |
| 1106 | mmu-miR-223 | 2838 | mmu-mir-223 |
| 1107 | rno-miR-223 | 2839 | rno-mir-223 |
| 1108 | sla-miR-223 | 2840 | sla-mir-223 |
| 1109 | mml-miR-223 | 2841 | mml-mir-223 |
| 1110 | ggo-miR-223 | 2842 | ggo-mir-223 |
| 1111 | ppa-miR-223 | 2843 | ppa-mir-223 |
| 1112 | ptr-miR-223 | 2844 | ptr-mir-223 |
| 1113 | ppy-miR-223 | 2845 | ppy-mir-223 |
| 1114 | mdo-miR-223 | 2846 | mdo-mir-223 |
| 1115 | gga-miR-223 | 2847 | gga-mir-223 |
| 1116 | xtr-miR-223 | 2848 | xtr-mir-223 |
| 1117 | dre-miR-223 | 2849 | dre-mir-223 |
| 1118 | fru-miR-223 | 2850 | fru-mir-223 |
| 1119 | tni-miR-223 | 2851 | tni-mir-223 |
| 1120 | mmu-miR-224 | 2852 | mmu-mir-224 |
| 1121 | rno-miR-224 | 2853 | rno-mir-224 |
| 1122 | mml-miR-224 | 2854 | mml-mir-224 |
| 1123 | mne-miR-224 | 2855 | mne-mir-224 |
| 1124 | ggo-miR-224 | 2856 | ggo-mir-224 |
| 1125 | ppa-miR-224 | 2857 | ppa-mir-224 |
| 1126 | ptr-miR-224 | 2858 | ptr-mir-224 |
| 1127 | ppy-miR-224 | 2859 | ppy-mir-224 |
| 1128 | cfa-miR-224 | 2860 | cfa-mir-224 |
| 1129 | ssc-miR-224 | 2861 | ssc-mir-224 |
| 1130 | mmu-miR-302b* | 2862 | mmu-mir-302b |
| 1131 | gga-miR-302b* | 2863 | gga-mir-302b |
| 1132 | gga-miR-302c* | 2864 | gga-mir-302c |
| 1133 | mmu-miR-374 | 2865 | mmu-mir-374 |
| 1134 | rno-miR-374 | 2866 | rno-mir-374 |
| 1135 | mml-miR-374a | 2867 | mml-mir-374a |
| 1136 | mml-miR-374b | 2868 | mml-mir-374b |
| 1137 | cfa-miR-374b | 2869 | cfa-mir-374b |
| 1138 | bta-miR-374 | 2870 | bta-mir-374 |
| 1139 | rno-miR-376b-3p | 2871 | rno-mir-376b |
| 1140 | mml-miR-376a | 2872 | mml-mir-376a-1 |
| | | 2873 | mml-mir-376a-2 |
| 1141 | mml-miR-376b | 2874 | mml-mir-376b |
| 1142 | cfa-miR-376 | 2875 | cfa-mir-376-1 |
| | | 2876 | cfa-mir-376-2 |
| | | 2877 | cfa-mir-376-3 |
| 1143 | mmu-miR-409-5p | 2878 | mmu-mir-409 |
| 1144 | rno-miR-409-5p | 2879 | rno-mir-409 |
| 1145 | mml-miR-409-5p | 2880 | mml-mir-409 |
| 1146 | mmu-miR-429 | 2881 | mmu-mir-429 |
| 1147 | rno-miR-429 | 2882 | rno-mir-429 |
| 1148 | mml-miR-429 | 2883 | mml-mir-429 |
| 1149 | cfa-miR-429 | 2884 | cfa-mir-429 |
| 1150 | gga-miR-429 | 2885 | gga-mir-429 |

TABLE 3-24

| sequence | | sequence | miRNA |
|---|---|---|---|
| number | miRNA name | number | precursor name |
| 1151 | xla-miR-429 | 2886 | xla-mir-429 |
| 1152 | xtr-miR-429 | 2887 | xtr-mir-429 |
| 1153 | dre-miR-429 | 2888 | dre-mir-429 |
| 1154 | fru-miR-429 | 2889 | fru-mir-429 |
| 1155 | tni-miR-429 | 2890 | tni-mir-429 |
| 1156 | mmu-miR-200c | 2891 | mmu-mir-200c |
| 1157 | rno-miR-200b | 2892 | rno-mir-200b |
| 1158 | rno-miR-200c | 2893 | rno-mir-200c |
| 1159 | cfa-miR-200c | 2894 | cfa-mir-200c |
| 1160 | mdo-miR-200b | 2895 | mdo-mir-200b |
| 1161 | mdo-miR-200c | 2896 | mdo-mir-200c |
| 1162 | gga-miR-200b | 2897 | gga-mir-200b |
| 1163 | xtr-miR-200b | 2898 | xtr-mir-200b |
| 1164 | bta-miR-200b | 2899 | bta-mir-200b |
| 1165 | bta-miR-200c | 2900 | bta-mir-200c |
| 1166 | dre-miR-200b | 2901 | dre-mir-200b |
| 1167 | dre-miR-200c | 2902 | dre-mir-200c |
| 1168 | fru-miR-200b | 2903 | fru-mir-200b |
| 1169 | tni-miR-200b | 2904 | tni-mir-200b |
| 1170 | mmu-miR-448 | 2905 | mmu-mir-448 |
| 1171 | rno-miR-448 | 2906 | rno-mir-448 |
| 1172 | mml-miR-448 | 2907 | mml-mir-448 |
| 1173 | cfa-miR-448 | 2908 | cfa-mir-448 |
| 1174 | cfa-miR-450a | 2909 | cfa-mir-450a |
| 1175 | mmu-miR-451 | 2910 | mmu-mir-451 |
| 1176 | rno-miR-451 | 2911 | rno-mir-451 |
| 1177 | mml-miR-451 | 2912 | mml-mir-451 |
| 1178 | mdo-miR-451 | 2913 | mdo-mir-451 |
| 1179 | gga-miR-451 | 2914 | gga-mir-451 |
| 1180 | xtr-miR-451 | 2915 | xtr-mir-451 |
| 1181 | dre-miR-451 | 2916 | dre-mir-451 |
| 1182 | mmu-miR-452 | 2917 | mmu-mir-452 |
| 1183 | mmu-miR-487b | 2918 | mmu-mir-487b |
| 1184 | rno-miR-487b | 2919 | rno-mir-487b |
| 1185 | mml-miR-487b | 2920 | mml-mir-487b |
| 1186 | bta-miR-487b | 2921 | bta-mir-487b |
| 1187 | gga-miR-489 | 2922 | gga-mir-489 |
| 1188 | xtr-miR-489 | 2923 | xtr-mir-489 |
| 1189 | dre-miR-489 | 2924 | dre-mir-489 |
| 1190 | fru-miR-489 | 2925 | fru-mir-489 |
| 1191 | tni-miR-489 | 2926 | tni-mir-489 |
| 1192 | age-miR-514 | 2927 | age-mir-514 |
| 1193 | mml-miR-514 | 2928 | mml-mir-514-1 |
| | | 2929 | mml-mir-514-2 |
| 1194 | pbi-miR-514 | 2930 | pbi-mir-514 |
| 1195 | ptr-miR-514 | 2931 | ptr-mir-514-1 |
| | | 2932 | ptr-mir-514-2 |
| | | 2933 | ptr-mir-514-3 |
| | | 2934 | ptr-mir-514-4 |
| 1196 | ssy-miR-514 | 2935 | ssy-mir-514 |
| 1197 | mml-miR-518c | 2936 | mml-mir-518c |
| 1198 | mml-miR-518d | 2937 | mml-mir-518d |
| 1199 | mmu-miR-542-3p | 2938 | mmu-mir-542 |
| 1200 | rno-miR-542-3p | 2939 | rno-mir-542 |

TABLE 3-25

| sequence | | sequence | miRNA |
|---|---|---|---|
| number | miRNA name | number | precursor name |
| 1201 | mml-miR-542-3p | 2940 | mml-mir-542 |
| 1202 | mmu-miR-544 | 2941 | mmu-mir-544 |
| 1203 | mml-miR-544 | 2942 | mml-mir-544 |
| 1204 | mml-miR-601 | 2943 | mml-mir-601 |
| 1205 | mml-miR-609 | 2944 | mml-mir-609 |
| 1206 | mml-miR-632 | 2945 | mml-mir-632 |
| 1207 | mml-miR-644 | 2946 | mml-mir-644 |
| 1208 | mmu-miR-365 | 2947 | mmu-mir-365-1 |
| | | 2948 | mmu-mir-365-2 |
| 1209 | rno-miR-365 | 2949 | rno-mir-365 |
| 1210 | mml-miR-365 | 2950 | mml-mir-365-1 |
| | | 2951 | mml-mir-365-2 |
| 1211 | cfa-miR-365 | 2952 | cfa-mir-365-1 |
| | | 2953 | cfa-mir-365-2 |
| 1212 | mdo-miR-365 | 2954 | mdo-mir-365 |
| 1213 | gga-miR-365 | 2955 | gga-mir-365-1 |
| | | 2956 | gga-mir-365-2 |
| 1214 | xtr-miR-365 | 2957 | xtr-mir-365-1 |
| 1215 | bta-miR-365 | 2958 | bta-mir-365 |
| 1216 | dre-miR-365 | 2959 | dre-mir-365-1 |
| | | 2960 | dre-mir-365-2 |
| | | 2961 | dre-mir-365-3 |
| | | 2962 | dre-mir-365-4 |
| 1217 | fru-miR-365 | 2963 | fru-mir-365 |
| 1218 | tni-miR-365 | 2964 | tni-mir-365 |
| 1219 | mmu-miR-142-3p | 2653 | mmu-mir-142 |
| 1220 | rno-miR-142-3p | 2654 | rno-mir-142 |
| 1221 | mml-miR-142-3p | 2655 | mml-mir-142 |
| 1222 | gga-miR-142-3p | 2965 | gga-mir-142 |
| 1223 | xtr-miR-142-3p | 2656 | xtr-mir-142-1 |
| | | 2657 | xtr-mir-142-2 |
| 1224 | mmu-miR-200a | 2797 | mmu-mir-200a |
| 1225 | rno-miR-200a | 2966 | rno-mir-200a |
| 1226 | mml-miR-200a | 2967 | mml-mir-200a |
| 1227 | mdo-miR-200a | 2798 | mdo-nir-200a |
| 1228 | gga-miR-200a | 2968 | gga-mir-200a |
| 1229 | xtr-miR-200a | 2969 | xtr-mir-200a |
| 1230 | bta-miR-200a | 2970 | bta-mir-200a |
| 1231 | dre-miR-200a | 2971 | dre-mir-200a |
| 1232 | fru-miR-200a | 2972 | fru-mir-200a |
| 1233 | tni-miR-200a | 2973 | tni-mir-200a |
| 1234 | mmu-miR-361 | 2974 | mmu-mir-361 |
| 1235 | rno-miR-361 | 2975 | rno-mir-361 |
| 1236 | cfa-miR-361 | 2976 | cfa-mir-361 |
| 1237 | bta-miR-361 | 2977 | bta-mir-361 |
| 1238 | hsa-miR-15a | 2978 | hsa-mir-15a |
| 1239 | hsa-miR-15b | 2979 | hsa-mir-15b |
| 1240 | hsa-miR-424 | 2980 | hsa-mir-424 |
| 1241 | hsa-miR-497 | 2981 | hsa-mir-497 |
| 1242 | mmu-miR-15a | 2982 | mmu-mir-15a |
| 1243 | mmu-miR-15b | 2983 | mmu-mir-15b |
| 1244 | mmu-miR-322 | 2984 | mmu-mir-322 |
| 1245 | mmu-miR-497 | 2985 | mmu-mir-497 |
| 1246 | rno-miR-15b | 2986 | rno-mir-15b |
| 1247 | rno-miR-322 | 2987 | rno-mir-322 |
| 1248 | rno-miR-497 | 2988 | rno-mir-497 |
| 1249 | age-miR-15a | 2989 | age-mir-15a |
| 1250 | age-miR-15b | 2990 | age-mir-15b |

TABLE 3-26

| sequence | | sequence | miRNA |
|---|---|---|---|
| number | miRNA name | number | precursor name |
| 1251 | lla-miR-15a | 2991 | lla-mir-15a |
| 1252 | lla-miR-15b | 2992 | lla-mir-15b |
| 1253 | sla-miR-15a | 2993 | sla-mir-15a |
| 1254 | mml-miR-15a | 2994 | mml-mir-15a |
| 1255 | mml-miR-15b | 2995 | mml-mir-15b |
| 1256 | mml-miR-424 | 2996 | mml-mir-424 |
| 1257 | mml-miR-497 | 2997 | mml-mir-497 |
| 1258 | mne-miR-15a | 2998 | mne-mir-15a |
| 1259 | mne-miR-15b | 2999 | mne-mir-15b |
| 1260 | ggo-miR-15a | 3000 | ggo-mir-15a |
| 1261 | ggo-miR-15b | 3001 | ggo-mir-15b |
| 1262 | ppa-miR-15a | 3002 | ppa-mir-15a |
| 1263 | ppa-miR-15b | 3003 | ppa-mir-15b |
| 1264 | ptr-miR-15a | 3004 | ptr-mir-15a |
| 1265 | ptr-miR-15b | 3005 | ptr-mir-15b |
| 1266 | ppy-miR-15a | 3006 | ppy-mir-15a |
| 1267 | ppy-miR-15b | 3007 | ppy-mir-15b |
| 1268 | lca-miR-155 | 3008 | lca-mir-15a |
| 1269 | cfa-miR-15a | 3009 | cfa-mir-15a |
| 1270 | cfa-miR-15b | 3010 | cfa-mir-15b |
| 1271 | cfa-miR-497 | 3011 | cfa-mir-497 |
| 1272 | mdo-miR-15a | 3012 | mdo-mir-15a |
| 1273 | gga-miR-15a | 3013 | gga-mir-15a |
| 1274 | gga-miR-15b | 3014 | gga-mir-15b |
| 1275 | xtr-miR-15a | 3015 | xtr-mir-15a |
| 1276 | xtr-miR-15b | 3016 | xtr-mir-15b |
| 1277 | xtr-miR-15c | 3017 | xtr-mir-15c |
| 1278 | bta-miR-15a | 3018 | bta-mir-15a |
| 1279 | bta-miR-15b | 3019 | bta-mir-15b |
| 1280 | bta-miR-497 | 3020 | bta-mir-497 |
| 1281 | dre-miR-15a | 3021 | dre-mir-15a-1 |
| | | 3022 | dre-mir-15a-2 |
| 1282 | dre-miR-15b | 3023 | dre-mir-15b |
| 1283 | dre-miR-457a | 3024 | dre-mir-457a |
| 1284 | dre-miR-457b | 3025 | dre-mir-457b |
| 1285 | fru-miR-15a | 3026 | fru-mir-15a |
| 1286 | tni-miR-15a | 3027 | tni-mir-15a |
| 1287 | mmu-miR-20b* | 1786 | mmu-mir-20b |
| 1288 | rno-miR-20b-3p | 3028 | rno-mir-20b |
| 1289 | dre-miR-20a* | 1809 | dre-mir-20a |
| 1290 | hsa-miR-590-5p | 3029 | hsa-mir-590 |
| 1291 | mmu-miR-590-5p | 3030 | mmu-mir-590 |
| 1292 | mml-miR-590-5p | 3031 | mml-mir-590 |
| 1293 | hsa-miR-92a | 3032 | hsa-mir-92a-1 |
| | | 3033 | hsa-mir-92a-2 |
| 1294 | hsa-miR-92b | 3034 | hsa-mir-92b |
| 1295 | hsa-miR-363 | 3035 | hsa-mir-363 |
| 1296 | hsa-miR-367 | 3036 | hsa-mir-367 |
| 1297 | mmu-miR-92a | 3037 | mmu-mir-92a-1 |
| | | 3038 | mmu-mir-92a-2 |
| 1298 | mmu-miR-92b | 3039 | mmu-mir-92b |
| 1299 | mmu-miR-363 | 3040 | mmu-mir-363 |
| 1300 | mmu-miR-367 | 3041 | mmu-mir-367 |

TABLE 3-27

| sequence | | sequence | miRNA |
|---|---|---|---|
| number | miRNA name | number | precursor name |
| 1301 | rno-miR-92a | 3042 | rno-mir-92a-1 |
| | | 3043 | rno-mir-92a-2 |
| 1302 | rno-miR-92b | 3044 | rno-mir-92b |
| 1303 | rno-miR-363 | 3045 | rno-mir-363 |
| 1304 | age-miR-92 | 3046 | age-mir-92-1 |
| | | 3047 | age-mir-92-2 |
| 1305 | lla-miR-92 | 3048 | lla-mir-92-1 |
| | | 3049 | lla-mir-92-2 |
| 1306 | sla-miR-92 | 3050 | sla-mir-92-1 |
| | | 3051 | sla-mir-92-2 |
| 1307 | mml-miR-92a | 3052 | mml-mir-92a-1 |
| | | 3053 | mml-mir-92a-2 |
| 1308 | mml-miR-92b | 3054 | mml-mir-92b |
| 1309 | mml-miR-363 | 3055 | mml-mir-363 |
| 1310 | mml-miR-367 | 3056 | mml-mir-367 |
| 1311 | mne-miR-92 | 3057 | mne-mir-92 |
| 1312 | ggo-miR-92 | 3058 | ggo-mir-92-1 |
| | | 3059 | ggo-mir-92-2 |
| 1313 | ppa-miR-92 | 3060 | ppa-mir-92-1 |
| | | 3061 | ppa-mir-92-2 |
| 1314 | ptr-miR-92 | 3062 | ptr-mir-92-1 |
| | | 3063 | ptr-mir-92-2 |
| 1315 | ppy-miR-92 | 3064 | ppy-mir-92-1 |
| | | 3065 | ppy-mir-92-2 |
| 1316 | lca-miR-92 | 3066 | lca-mit-92-1 |
| | | 3067 | lca-mir-92-2 |
| 1317 | cfa-miR-92a | | |
| | | 3068 | cfa-mir-92a-1 |
| | | 3069 | cfa-mir-92a-2 |
| 1318 | cfa-miR-92b | 3070 | cfa-mir-92b |
| 1319 | cfa-miR-363 | 3071 | cfa-mir-363 |
| 1320 | mdo-miR-92 | 3072 | mdo-mir-92 |
| 1321 | gga-miR-92 | 3073 | gga-mir-92 |
| 1322 | gga-miR-367 | 3074 | gga-mir-367 |
| 1323 | xtr-miR-92a | 3075 | xtr-mir-92a-1 |
| | | 3076 | xtr-mir-92a-2 |
| 1324 | xtr-miR-92b | 3077 | xtr-mir-92b |
| 1325 | xtr-miR-363-3p | 3078 | xtr-mir-363 |
| 1326 | xtr-miR-367 | 3079 | xtr-mir-367 |
| 1327 | bta-miR-92 | 30B0 | bta-mir-92 |
| 1328 | dre-miR-92a | 3081 | dre-mir-92a-1 |
| | | 3082 | dre-mir-92a-2 |
| 1329 | dre-miR-92b | 3083 | dre-mir-92b |
| 1330 | dre-miR-363 | 3084 | dre-mir-363 |
| 1331 | fru-miR-92 | 3085 | fru-mir-92-1 |
| | | 3086 | fru-mir-92-2 |
| 1332 | tni-miR-92 | 3087 | tni-mir-92-1 |
| | | 3088 | tni-mir-92-2 |
| 1333 | hsa-miR-26a | 3089 | hsa-mir-26a-1 |
| | | 3090 | hsa-mir-26a-2 |
| 1334 | hse-miR-1297 | 3091 | hsa-mir-1297 |
| 1335 | hsa-miR-30d* | 3092 | hsa-mir-30d |
| 1336 | hsa-miR-30e* | 3093 | hsa-mir-30e |
| 1337 | hsa-miR-34c-5p | 3094 | hsa-mir-34c |
| 1338 | mmu-miR-699 | 3095 | mmu-mir-699 |
| 1339 | hsa-miR-103 | 3096 | hsa-mir-103-1 |
| | | 3097 | hsa-mir-103-2 |
| 1340 | mmu-miR-103 | 3098 | mmu-mir-103-1 |
| | | 3099 | mmu-mir-103-2 |
| 1341 | rno-miR-103 | 3100 | rno-mir-103-1 |
| | | 3101 | rno-mir-103-2 |
| 1342 | age-miR-103 | 3102 | age-mir-103 |
| 1343 | lla-miR-103 | 3103 | lla-mir-103 |
| 1344 | mml-miR-103 | 3104 | mml-mir-103-1 |
| | | 3105 | mml-mir-103-2 |
| 1345 | mne-miR-103 | 3106 | mne-mir-103 |
| 1346 | ggo-miR-103 | 3107 | ggo-mir-103 |
| 1347 | ppa-miR-103 | 3108 | ppa-mir-103 |
| 1348 | ptr-miR-103 | 3109 | ptr-mir-103 |
| 1349 | ppy-miR-103 | 3110 | ppy-mir-103 |
| 1350 | cfa-miR-103 | 3111 | cfa-mir-103 |

TABLE 3-28

| sequence | | sequence | miRNA |
|---|---|---|---|
| number | miRNA name | number | precursor name |
| 1351 | mdo-miR-103 | 3112 | mdo-mir-103-1 |
| | | 3113 | mdo-mir-103-2 |
| 1352 | gga-miR-103 | 3114 | gga-mir-103-1 |
| | | 3115 | gga-mir-103-2 |
| 1353 | xtr-miR-103 | 3116 | xtr-mir-103-1 |
| | | 3117 | xtr-mir-103-2 |
| 1354 | bta-miR-103 | 3118 | bta-mir-103-1 |
| | | 3119 | bta-mir-103-2 |
| 1355 | ssc-miR-103 | 3120 | ssc-mir-103 |
| 1356 | dre-miR-103 | 3121 | dre-mir-103 |
| 1357 | fru-miR-103 | 3122 | fru-mir-103 |
| 1358 | tni-miR-103 | 3123 | tni-mir-103 |
| 1359 | hsa-miR-148a | 3124 | hsa-mir-148a |
| 1360 | hsa-miR-152 | 3125 | hsa-mir-152 |
| 1361 | mmu-miR-152 | 3126 | mmu-mir-152 |
| 1362 | rno-miR-152 | 3127 | rno-mir-152 |
| 1363 | mml-miR-152 | 3128 | mml-mir-152 |
| 1364 | cfa-miR-152 | 3129 | cfa-mir-152 |
| 1365 | mdo-miR-152 | 3130 | mdo-mir-152 |
| 1366 | dre-miR-152 | 3131 | dre-mir-152 |
| 1367 | fru-miR-152 | 3132 | fru-mir-152 |
| 1368 | tni-miR-152 | 3133 | tni-mir-152 |
| 1369 | hsa-miR-190b | 3134 | hsa-mir-190b |
| 1370 | hsa-miR-208b | 3135 | hsa-mir-208b |
| 1371 | dre-miR-736 | 3136 | dre-mir-736 |
| 1372 | hsa-miR-204 | 3137 | hsa-mir-204 |
| 1373 | mmu-miR-204 | 3138 | mmu-mir-204 |
| 1374 | rno-miR-204 | 3139 | rno-mir-204 |
| 1375 | sla-miR-204 | 3140 | sla-mir-204 |
| 1376 | mml-miR-204 | 3141 | mml-mir-204 |
| 1377 | mne-miR-204 | 3142 | mne-mir-204 |
| 1378 | ggo-miR-204 | 3143 | ggo-mir-204 |
| 1379 | ppa-miR-204 | 3144 | ppa-mir-204 |
| 1380 | ptr-miR-204 | 3145 | ptr-mir-204 |
| 1381 | ppy-miR-204 | 3146 | ppy-mir-204 |
| 1382 | cfa-miR-204 | 3147 | cfa-mir-204 |
| 1383 | mdo-miR-204 | 3148 | mdo-mir-204 |
| 1384 | gga-miR-204 | 3149 | gga-mir-204-1 |
| | | 3150 | gga-mir-204-2 |
| 1385 | xtr-miR-204 | 3151 | xtr-mir-204-1 |
| | | 3152 | xtr-mir-204-2 |
| 1386 | bta-miR-204 | 3153 | bta-mir-204 |
| 1387 | ssc-miR-204 | 3154 | ssc-mir-204 |
| 1388 | dre-miR-204 | 3155 | dre-mir-204-1 |
| | | 3156 | dre-mir-204-2 |
| | | 3157 | dre-mir-204-3 |
| 1389 | fru-miR-204 | 3158 | fru-mir-204 |
| 1390 | tni-miR-204a | 3159 | tni-mir-204a |
| 1391 | tni-miR-204b | 3160 | tni-mir-204b |
| 1392 | mmu-miR-761 | 3161 | mmu-mir-761 |
| 1393 | hsa-miR-362-3p | 1667 | hsa-mir-362 |
| 1394 | mmu-miR-362-3p | 3162 | mmu-mir-362 |
| 1395 | mml-miR-362-3p | 3163 | mml-mir-362 |
| 1396 | mmu-miR-489 | 3164 | mmu-mir-489 |
| 1397 | dre-miR-731 | 3165 | dre-mir-731 |
| 1398 | rno-miR-344-5p | 3166 | rno-mir-344-1 |
| 1399 | hsa-miR-33b* | 1634 | hsa-mir-33b |
| 1400 | hsa-miR-519e | 3167 | hsa-mir-519e |

TABLE 3-29

| sequence | | sequence | miRNA |
|---|---|---|---|
| number | miRNA name | number | precursor name |
| 1401 | hsa-miR-519e* | 3167 | hsa-mir-519e |
| 1402 | hsa-miR-302a | 3168 | hsa-mir-302a |
| 1403 | hsa-miR-30 b | 1665 | hsa-mir-302b |
| 1404 | hsa-miR-302c | 1666 | hsa-mir-302c |
| 1405 | hsa-miR-302d | 3169 | hsa-mir-302d |
| 1406 | hsa-miR-302e | 3170 | hsa-mir-302e |
| 1407 | hsa-miR-372 | 3171 | hsa-mir-372 |
| 1408 | hsa-miR-373 | 1668 | hsa-mir-373 |
| 1409 | hsa-miR-520a-3p | 3172 | hsa-mir-520a |
| 1410 | hsa-miR-520b | 3173 | hsa-mir-520b |
| 1411 | hsa-miR-520c-3p | 3174 | hsa-mir-520c |
| 1412 | hsa-miR-520e | 3175 | hsa-mir-520e |
| 1413 | mmu-miR-291a-3p | 3176 | mmu-mir-291a |
| 1414 | mmu-miR-294 | 3177 | mmu-mir-294 |
| 1415 | mmu-miR-295 | 3178 | mmu-mir-295 |
| 1416 | mmu-miR-302a | 3179 | mmu-mir-302a |
| 1417 | mmu-miR-302b | 2862 | mmu-mir-302b |
| 1418 | mmu-miR-302d | 3180 | mmu-mir-302d |
| 1419 | rno-miR-291a-3p | 3181 | rno-mir-291a |
| 1420 | age-miR-93 | 3182 | age-mir-93 |
| 1421 | lla-miR-93 | 3183 | lla-mir-93 |
| 1422 | sla-miR-93 | 3184 | sla-mir-93 |
| 1423 | mml-miR-93 | 3185 | mml-mir-93 |
| 1424 | mml-miR-302a | 3186 | mml-mir-302a |
| 1425 | mml-miR-302b | 3187 | mml-mir-302b |
| 1426 | mml-miR-302c | 3188 | mml-mir-302c |
| 1427 | mml-miR-302d | 3189 | mml-mir-302d |
| 1428 | mml-miR-372 | 3190 | mml-mir-372 |
| 1429 | mml-miR-373 | 3191 | mml-mir-373 |
| 1430 | mml-miR-519a | 3192 | mml-mir-519a |
| 1431 | mne-miR-93 | 3193 | mne-mir-93 |
| 1432 | ggo-miR-93 | 3194 | ggo-mir-93 |
| 1433 | ppa-miR-93 | 3195 | ppa-mir-93 |
| 1434 | ptr-miR-93 | 3196 | ptr-mir-93 |
| 1435 | ppy-miR-93 | 3197 | ppy-mir-93 |
| 1436 | cfa-miR-106a | 3198 | cfa-mir-106a |
| 1437 | mdo-miR-93 | 3199 | mdo-mir-93 |
| 1438 | mdo-miR-302a | 3200 | mde-mir-302a |
| 1439 | mdo-miR-302b | 3201 | mdo-mir-302b |
| 1440 | mdo-miR-302c | 3202 | mdo-mir-302c |
| 1441 | mdo-miR-302d | 3203 | mdo-mir-302d |
| 1442 | gga-miR-302b | 2863 | gga-mir-302b |
| 1443 | gga-miR-302c | 2864 | gga-mir-302c |
| 1444 | gga-miR-302d | 3204 | gga-mir-302d |
| 1445 | xla-miR-427 | 3205 | xla-mir-427 |
| 1446 | xla-miR-428 | 3206 | xla-mir-428 |
| 1447 | xtr-miR-93a | 3207 | xtr-mir-93a |
| 1448 | xtr-miR-302 | 3208 | xtr-mir-302 |
| 1449 | xtr-miR-428 | 3209 | xtr-mir-428 |
| 1450 | dre-miR-430a | 3210 | dre-mir-430a-1 |
| | | 3211 | dre-mir-430a-2 |
| | | 3212 | dre-mir-430a-3 |
| | | 3213 | dre-mir-430a-4 |
| | | 3214 | dre-mir-430a-5 |
| | | 3215 | dre-mir-430a-6 |
| | | 3216 | dre-mir-430a-7 |
| | | 3217 | dre-mir-430a-8 |
| | | 3218 | dre-mir-430a-9 |
| | | 3219 | dre-mir-430a-10 |
| | | 3220 | dre-mir-430a-11 |
| | | 3221 | dre-mir-430a-12 |
| | | 3222 | dre-mir-430a-13 |
| | | 3223 | dre mir-430a-14 |
| | | 3224 | dre-mir-430a-15 |
| | | 3225 | dre-mir-430a-18 |
| | | 3226 | dre-mir-430a-17 |
| | | 3227 | dre-mir-430a-18 |
| | | 3228 | dre-mir-430a-19 |
| | | 3229 | dre-mir-430a-20 |
| | | 3230 | dre-mir-430a-21 |
| | | 3231 | dre-mir-430a-22 |
| | | 3232 | dre-mir-430a-23 |

TABLE 3-30

| sequence | | sequence | miRNA |
|---|---|---|---|
| number | miRNA name | number | precursor name |
| 1451 | dre-miR-430b | 3233 | dre-mir-430b-1 |
| | | 3234 | dre-mir-430b-2 |
| | | 3235 | dre-mir-430b-3 |
| | | 3236 | dre-mir-430b-4 |
| | | 3237 | dre-mir-430b-5 |
| | | 3238 | dre-mir-430b-6 |
| | | 3239 | dre-mir-430b-7 |
| | | 3240 | dre-mir-430b-8 |
| | | 3241 | dre-mir-430b-9 |
| | | 3242 | dre-mir-430b-10 |
| | | 3243 | dre-mir-430b-11 |
| | | 3244 | dre-mir-430b-12 |
| | | 3245 | dre-mir-430b-13 |
| | | 3246 | dre-mir-430b-14 |
| | | 3247 | dre-mir-430b-15 |
| | | 3248 | dre-mir-430b-16 |
| | | 3249 | dre-mir-430b-17 |
| | | 3250 | dre-mir-430b-18 |
| | | 3251 | dre-mir-430b-19 |
| | | 3252 | dre-mir-430b-20 |
| | | 3253 | dre-mir-430b-21 |
| | | 3254 | dre-mir-430b-22 |
| | | 3255 | dre-mir-430b-23 |
| 1452 | dre-miR-430c | 3256 | dre-mir-430c-1 |
| | | 3257 | dre-mir-430c-2 |
| | | 3258 | dre-mir-430c-3 |
| | | 3259 | dre-mir-430c-4 |
| | | 3260 | dre-mir-430c-5 |
| | | 3261 | dre-mir-430c-6 |
| | | 3262 | dre-mir-430c-7 |
| | | 3263 | dre-mir-430c-8 |
| | | 3264 | dre-mir-430c-9 |
| | | 3265 | dre-mir-430c-10 |
| | | 3266 | dre-mir-430c-11 |
| | | 3267 | dre-mir-430c-12 |
| | | 3268 | dre-mir-430c-13 |
| | | 3263 | dre-mir-430c-14 |
| | | 3270 | dre-mir-430c-15 |
| | | 3271 | dre-mir-430c-16 |
| | | 3272 | dre-mir-430c-17 |
| | | 3273 | dre-mir-430c-18 |
| | | 3274 | dre-mir-430c-19 |
| | | 3275 | dre-mir-430c-20 |
| | | 3276 | dre-mir-430c-21 |
| 1453 | dre-miR-430i | 3277 | dre-mir-430i-1 |
| | | 3278 | dre-mir-430i-2 |
| | | 3279 | dre-mir-430i-3 |
| 1454 | dre-miR-430j | 3280 | dre-mir-430j |
| 1455 | mmu-miR-302c | 3281 | mmu-mir-302c |
| 1456 | gga-miR-302a | 3282 | gga-mir-302a |
| 1457 | hsa-miR-520g | 3283 | hsa-mir-520g |
| 1458 | mml-miR-518e | 3284 | mml-mir-518e |
| 1459 | hsa-miR-524-3p | 1688 | hsa-mir-524 |
| 1460 | hsa-miR-1285 | 3285 | hsa-mir-1285-1 |
| | | 3286 | hsa-mir-1285-2 |
| 1461 | hsa-miR-541 | 3287 | hsa-mir-541 |
| 1462 | hsa-let-7a | 3288 | hsa-let-7a-1 |
| | | 3289 | hsa-let-7a-2 |
| | | 3290 | hsa-let-7a-3 |
| 1463 | hsa-let-7b | 3291 | hsa-let-7b |
| 1464 | hsa-let-7c | 3292 | hsa-let-7c |
| 1465 | hsa-let-7d | 3293 | hsa-let-7d |
| 1466 | hsa-let-7f | 3294 | hsa-let-7f-1 |
| | | 3295 | hsa-let-7f-2 |
| 1467 | hsa-let-7g | 3296 | hsa-let-7g |
| 1468 | hsa-let-7i | 3297 | hsa-let-7i |
| 1469 | hsa-miR-98 | 3298 | hsa-mir-98 |
| 1470 | mmu-miR-98 | 3299 | mmu-mir-98 |
| 1471 | rno-miR-98 | 3300 | rno-mir-98 |

TABLE 3-31

| sequence | | sequence | miRNA |
|---|---|---|---|
| number | miRNA name | number | precursor name |
| 1472 | age-miR-98 | 3301 | age-mir-98 |
| 1473 | mml-miR-98 | 3302 | mml-mir-98 |
| 1474 | ggo-miR-98 | 3303 | ggo-mir-98 |
| 1475 | ppa-miR-98 | 3304 | ppa-mir-98 |
| 1476 | ptr-miR-98 | 3305 | ptr-mir-98 |
| 1477 | ppy-miR-98 | 3306 | ppy-mir-98 |
| 1478 | cfa-miR-98 | 3307 | cfa-mir-98 |
| 1479 | xtr-miR-98 | 3308 | xtr-mir-98 |
| 1480 | bta-miR-98 | 3309 | bta-mir-98 |
| 1481 | hsa-miR-23a | 3310 | hsa-mir-23a |
| 1482 | hsa-miR-130a* | 3311 | hsa-mir-130a |
| 1483 | hsa-miR-27a | 3312 | hsa-mir-27a |
| 1484 | hsa-miR-708 | 3313 | hsa-mir-708 |
| 1485 | mmu-miR-708 | 3314 | mmu-mir-708 |
| 1486 | rno-miR-708 | 3315 | rno-mir-708 |
| 1487 | cfa-miR-708 | 3316 | cfa-mir-708 |
| 1488 | hsa-miR-33a | 3317 | hsa-mir-33a |
| 1489 | hsa-miR-1271 | 3318 | hsa-mir-1271 |
| 1490 | age-miR-507 | 3319 | age-mir-507 |
| 1491 | cfa-miR-1271 | 3320 | cfa-mir-1271 |
| 1492 | hsa-miR-99a | 3321 | hsa-mir-99a |
| 1493 | hsa-miR-99b | 3322 | hsa-mir-99b |
| 1494 | mmu-miR-99a | 3323 | mmu-mir-99a |
| 1495 | mmu-miR-99b | 3324 | mmu-mir-99b |
| 1496 | rno-miR-99a | 3325 | rno-mir-99a |
| 1497 | rno-miR-99b | 3326 | rno-mir-99b |
| 1498 | lla-miR-99a | 3327 | lla-mir-99a |
| 1499 | mml-miR-99a | 3328 | mml-mir-99a |
| 1500 | mml-miR-99b | 3329 | mml-mir-99b |
| 1501 | mne-miR-99a | 3330 | mne-mir-99a |
| 1502 | ggo-miR-99a | 3331 | ggo-mir-99a |
| 1503 | ppa-miR-99a | 3332 | ppa-mir-99a |
| 1504 | ptr-miR-99a | 3333 | ptr-mir-99a |
| 1505 | ppy-miR-99a | 3334 | ppy-mir-99a |
| 1506 | cfa-mIR-99a | 3335 | cfa-mir-99a-1 |
| | | 3336 | cfa-mir-99a-2 |
| 1507 | cfa-miR-99b | 3337 | cfa-mir-99b |
| 1508 | gga-miR-99a | 3338 | gga-mir-99a |
| 1509 | xtr-miR-99 | 3339 | xtr-mir-99 |
| 1510 | bta-miR-99a | 3340 | bta-mir-99a |
| 1511 | bta-miR-99b | 3341 | bta-mir-99b |
| 1512 | ssc-miR-99b | 3342 | ssc-mir-99b |
| 1513 | dre-miR-99 | 3343 | dre-mir-99-1 |
| | | 3344 | dre-mir-99-2 |
| 1514 | hsa-miR-128 | 3345 | hsa-mir-128-1 |
| | | 3346 | hsa-mir-128-2 |
| 1515 | dre-miR-722 | 3347 | dre-mir-722 |
| 1516 | hsa-miR-135a | 3348 | hsa-mir-135a-1 |
| | | 3349 | hsa-mir-135a-2 |
| 1517 | hsa-miR-181b | 3350 | hsa-mir-181b-1 |
| | | 3351 | hsa-mir-181b-2 |
| 1518 | hsa-miR-181c | 3352 | hsa-mir-181c |
| 1519 | hsa-miR-181d | 3353 | hsa-mir-181d |
| 1520 | hsa-miR-200b* | 3354 | hsa-mir-200b |
| 1521 | hsa-miR-302d* | 3169 | hsa-mir-302d |
| 1522 | hsa-miR-616* | 3355 | hsa-mir-616 |
| 1523 | mmu-miR-294* | 3177 | mmu-mir-294 |
| 1524 | hsa-miR-374b | 3356 | hsa-mir-374b |
| 1525 | hsa-miR-376b | 3357 | hsa-mir-376b |
| 1526 | hsa-miR-200b | 3354 | hsa-mir-200b |
| 1527 | mml-miR-548a | 3358 | mml-mir-548a |
| 1528 | hsa-miR-517a | 1590 | hsa-mir-517a |

TABLE 3-32

| sequence | | sequence | miRNA |
|---|---|---|---|
| number | miRNA name | number | precursor name |
| 1529 | hsa-miR-518a-3p | 3359 | hsa-mir-518a-1 |
| | | 3360 | hsa-mir-518a-2 |
| 1530 | hsa-miR-518b | 3361 | hsa-mir-518b |
| 1531 | hsa-miR-518d-3p | 3362 | hsa-mir-518d |
| 1532 | hsa-miR-518f | 3363 | hsa-mir-518f |
| 1533 | hsa-miR-520d-5p | 1593 | hsa-mir--520d |
| 1534 | mml-miR-518a-50 | 3364 | mml-mir-518a |
| 1535 | mml-miR-520d-5p | 3365 | mml-mir-520d |
| 1536 | hsa-miR-200c* | 1675 | hsa-mir-200c |
| 1537 | mmu-miR-200c* | 2891 | mmu-mir-200c |
| 1538 | mml-miR-580 | 3366 | mml-mir-580 |
| 1539 | hsa-miR-141 | 3367 | hsa-mir-141 |
| 1540 | mmu-miR-141 | 3368 | mmu-mir-141 |
| 1541 | rno-miR-141 | 3369 | rno-mir-141 |
| 1542 | mdo-miR-141 | 3370 | mdo-mir-141 |
| 1543 | dre-miR-141 | 3371 | dre-mir-141 |
| 3372 | hsa-miR-29a | 3742 | hsa-mir-29a |
| 3373 | hsa-miR-29b | 3743 | hsa-mir-29b-1 |
| | | 3744 | hsa-mir-29b-2 |
| 3374 | hsa-miR-30a-5p | 1557 | hsa-mir-30a |
| 3375 | hsa-miR-30b | 3745 | hsa-mir-30b |
| 3376 | hsa-miR-105 | 3746 | hsa-mir-105-1 |
| | | 3747 | hsa-mir-105-2 |
| 3377 | hsa-miR-124a | 3748 | hsa-mir-124-1 |
| | | 3749 | hsa-mir-124-2 |
| | | 3750 | hsa-mir-124-3 |
| 3378 | hsa-miR-128a | 3345 | hsa-mir-128-1 |
| 3379 | hsa-miR-150 | 3751 | hsa-mir-150 |
| 3380 | hsa-miR-154 | 3752 | hsa-mir-154 |
| 3381 | hsa-miR-299-3p | 1575 | hsa-mir-299 |
| 3382 | hsa-miR-380-5p | 3753 | hsa-mir-380 |
| 3383 | hsa-miR-383 | 3754 | hsa-mir-383 |
| 3384 | hsa-miR-411 | 3755 | hsa-mir-411 |
| 3385 | hsa-miR-423 | 3756 | hsa-mir-423 |
| 3386 | hsa-miR-433 | 3757 | hsa-mir-433 |
| 3387 | hsa-miR-454-3p | 3758 | hsa-mir-454 |
| 3388 | hsa-miR-501 | 3759 | hsa-mir-501 |
| 3389 | hsa-miR-504 | 3760 | hsa-mir-504 |
| 3390 | hsa-miR-506 | 3761 | hsa-mir-506 |
| 3391 | hsa-miR-507 | 3762 | hsa-mir-507 |
| 3392 | hsa-miR-508 | 3763 | hsa-mir-508 |
| 3393 | hsa-miR-511 | 3764 | hsa-mir-511-1 |
| | | 3765 | hsa-mir-511-2 |
| 3394 | hsa-miR-512-3p | 3766 | hsa-mir-512-1 |
| | | 3767 | hsa-mir-512-2 |
| 3395 | hsa-miR-527 | 3768 | hsa-mir-527 |
| 3396 | hsa-miR-562 | 3769 | hsa-mir-562 |
| 3397 | hsa-miR-567 | 3770 | hsa-mir-567 |
| 3398 | hsa-miR-589 | 3771 | hsa-mir-589 |
| 3399 | hsa-miR-597 | 3772 | hsa-mir-597 |
| 3400 | hsa-miR-605 | 3773 | hsa-mir-605 |
| 3401 | hsa-miR-619 | 3774 | hsa-mir-619 |
| 3402 | hsa-miR-629 | 3775 | hsa-mir-629 |
| 3403 | hsa-miR-640 | 3776 | hsa-mir-640 |

TABLE 3-33

| sequence | | sequence | miRNA |
|---|---|---|---|
| number | miRNA name | number | precursor name |
| 3404 | hsa-miR-767-5p | 3777 | hsa-mir-767 |
| 3405 | hsa-miR-770-5p | 3778 | hsa-mir-770 |
| 3406 | hsa-miR-802 | 3779 | hsa-mir-802 |
| 3407 | xtr-miR-16c | 3780 | xtr-mir-16c |
| 3408 | mmu-miR-17* | 3781 | mmu-mir-17 |
| 3409 | cfa-miR-17 | 3782 | cfa-mir-17 |
| 3410 | dre-miR-17a* | 3783 | dre-mir-17a-1 |
| | | 3784 | dre-mir-17a-2 |
| 3411 | xla-miR-18 | 3785 | xla-Tnir-18 |
| 3412 | mmu-miR-20a | 3786 | mmu-mir-20a |
| 3413 | rno-miR-20b-5p | 3028 | rno-mir-20b |
| 3414 | xtr-miR-24a | 3787 | xtr-mir -24a |
| 3415 | mmu-miR-26a | 3788 | mmu-mir-26a-1 |
| | | 3789 | mmu-mir-26a-2 |
| 3416 | mmu-miR-30a* | 3790 | mmu-mir-30a |
| 3417 | mmu-miR-30e* | 3791 | mmu-mir-30e |
| 3418 | rno-miR-30a* | 3792 | rno-mir-30a |
| 3419 | mmu-miR-34c | 3793 | mmu-mir-34c |
| 3420 | mmu-miR-148a | 3794 | mmu-mir-148a |
| 3421 | rno-miR-148b-3p | 3795 | rno-mir-148b |
| 3422 | mmu-miR-190b | 3796 | mmu-mir-190b |
| 3423 | mmu-miR-199a-5p | 3797 | mmu-nir-199a-1 |
| | | 3798 | mmu-mir-199a-2 |
| 3424 | mmu-miR-199b* | 3799 | mmu-mir-199b |
| 3425 | rno-miR-199a-5p | 3800 | rno-mir-199a |
| 3426 | mml-miR-199a-5p | 2016 | mml-mir-199a-1 |
| | | 2017 | mml-mir-199a-2 |
| 3427 | gga-miR-199 | 3801 | gga-mir-199-1 |
| | | 3802 | gga-mir-199-2 |
| 3428 | bta-miR-199a-5p | 3803 | bta-mir-199a |
| 3429 | mmu-miR-208a | 3804 | mmu-mir-208a |
| 3430 | dre-miR-218a | 3805 | dre-mir-218a-1 |
| | | 3806 | dre-mir-218a-2 |
| 3431 | mmu-miR-299* | 3807 | mmu-mir-299 |
| 3432 | rno-miR-299 | 3808 | rno-mir-299 |
| 3433 | mmu-miR-325* | 3809 | mmu-mir-325 |
| 3434 | rno-miR-325-5p | 3810 | rno-mir-325 |
| 3435 | mmu-miR-338-3p | 3811 | mmu-mir-338 |
| 3436 | mml-miR-338-3p | 3812 | mml-mir-338 |
| 3437 | mmu-miR-425 | 3813 | mmu-mir-425 |
| 3438 | rno-miR-425 | 3814 | rno-mir-425 |
| 3439 | mml-miR-425 | 3815 | mml-mir-425 |
| 3440 | cfa-miR-425 | 3816 | cfa-mir-425 |
| 3441 | mmu-miR-485 | 3817 | mmu-mir-485 |
| 3442 | rno-miR-485 | 3818 | rno-mir-485 |
| 3443 | cfa-miR-485 | 3819 | cfa-mir-485 |
| 3444 | mml-miR-486-5p | 3820 | mml-mir-486 |
| 3445 | mmu-miR-488* | 3821 | mmu-mir-488 |
| 3446 | mml-miR-520a | 3822 | mml-mir-520a |
| 3447 | mml-miR-520d-3p | 3365 | mml-mir-520d |
| 3448 | mml-miR-520g | 3823 | mml-mir-520g |
| 3449 | mml-miR-650a | 3824 | mml-mir-650a-1 |
| | | 3825 | mml-mir-650a-2 |
| 3450 | mml-miR-54-5p | 3826 | mml-mir-654 |
| 3451 | mmu-miR-675-5p | 3827 | mmu-mir-675 |
| 3452 | dre-miR-194a | 3828 | dre-mir-194a |
| 3453 | mmu-let-7g | 3829 | mmu-let-7g |
| 3454 | xtr-miR-1a | 3830 | xtr-mir-1a-1 |
| | | 3831 | xtr-mir-1a-2 |

TABLE 3-34

| sequence | | sequence | miRNA |
|---|---|---|---|
| number | miRNA name | number | precursor name |
| 3455 | xtr-miR-9a | 3832 | xtr-mir-9a-1 |
| | | 3833 | xtr-mir-9a-2 |
| 3456 | ssc-miR-9-1 | 3834 | ssc-mir-9-1 |
| | | 3835 | ssc-mir-9-2 |
| 3457 | ssc-miR-9-2 | 3834 | ssc-mir-9-1 |
| | | 3835 | ssc-mir-9-2 |
| 3458 | mmu-miR-23a | 3836 | mmu-mir-23a |
| 3459 | mmu-miR-27a | 3837 | mmu-mir-27a |
| 3460 | xtr-miR-31b | 3838 | xtr-mir-31b |
| 3461 | mmu-miR-33 | 3839 | mmu-mir-33 |
| 3462 | mmu-miR-106b | 3840 | mmu-mir-106b |
| 3463 | mmu-miR-126-5p | 3841 | mmu-mir-126 |
| 3464 | cfa-miR-126 | 3842 | cfa-mir-126 |
| 3465 | mmu-miR-128 | 3843 | mmu-mir-128-1 |
| | | 3844 | mmu-mir-128-2 |
| 3466 | mmu-miR-129-5p | 3845 | mmu-mir-129-1 |
| | | 3846 | mmu-mir-129-2 |
| 3467 | mml-miR-129-5p | 3847 | mml-mir-129 |
| 3468 | xtr-miR-133o | 3848 | xtr-mir-133c |
| 3469 | mmu-miR-135a | 3849 | mmu-mir-135a-1 |
| | | 3850 | mmu-mir-135a-2 |
| 3470 | bta-miR--142 | 3851 | bta-mir-142 |
| 3471 | dre-miR-142a-5p | 3852 | dre-mir-142a |
| 3472 | mml-miR-146b-5p | 3853 | mml-mir-146b |
| 3473 | xtr-miR-146 | 3854 | xtr-mir-146 |
| 3474 | mmu-miR-181b | 3855 | mmu-mir-181b-1 |
| | | 3856 | mmu-mir-181b-2 |
| 3475 | fru-miR-182 | 3857 | fru-mir-182 |
| 3476 | tni-miR-182 | 3858 | tni-mir-182 |
| 3477 | mmu-miR-200b* | 3859 | mmu-mir-200b |
| 3478 | mmu-miR-216a | 3860 | mmu-mir-216a |
| 3479 | mdo-miR-222a | 3861 | mdo-mir-222a |
| 3480 | mmu-miR-296-5p | 3862 | mmu-mir-296 |
| 3481 | rno-miR-296* | 3863 | rno-mir-296 |
| 3482 | mml-miR-296-5p | 3864 | mml-mir-296 |
| 3483 | mmu-miR-302c* | 3281 | mmu-mir-302c |
| 3484 | mmu-miR-362-5p | 3162 | mmu-mir-362 |
| 3485 | mml-miR-362-5p | 3163 | mml-mir-362 |
| 3486 | cfa-miR-374a | 3865 | cfa-mir-374a |
| 3487 | mmu-miR-376b | 3866 | mmu-mir-376b |
| 3488 | mmu-miR-378* | 3867 | mmu-mir-378 |
| 3489 | rno-miR-378* | 3868 | rno-mir--378 |
| 3490 | mmu-miR-200b | 3859 | mmu-mir-200b |
| 3491 | rno-miR-450a | 3869 | rno-mir-450a |
| 3492 | cfa-miR-487 | 3870 | cfa-mir-487 |
| 3493 | mml-miR-517a | 3871 | mml-mir-517a |
| 3494 | mml-miR-518b | 3872 | mml-mir-518b |
| 3495 | cfa-miR-542 | 3873 | cfa-mir-542 |
| 3496 | mdo-miR-142 | 3874 | mdo-mir-142 |
| 3497 | dre-miR-142a-3p | 3852 | dre-mir-142a |
| 3498 | mml-miR-361-5p | 3875 | mml-mir-361 |
| 3499 | mmu-miR-29a | 3876 | mmu-mir-290 |
| 3500 | mmu-miR-29b | 3877 | mmu-mir-29b-1 |
| | | 3878 | mmu-mir-29b-2 |
| 3501 | mmu-miR-29c | 3879 | mmu-mir-29c |
| 3502 | rno-miR-29a | 3880 | rno-mir-29a |

TABLE 3-35

| sequence | | sequence | miRNA |
|---|---|---|---|
| number | miRNA name | number | precursor name |
| 3503 | rno-miR-29b | 3881 | rno-mir-29b-1 |
| | | 3882 | rno-mir-29b-2 |
| 3504 | rno-miR-29c | 3883 | rno-mir-29c |
| 3505 | age-miR-29b | 3884 | age-mir-29b |
| 3506 | lla-miR-29b | 3885 | lla-mir-29b |
| 3507 | sla-miR-29b | 3886 | sla-mir-29b |
| 3508 | mml-miR-29b | 3887 | mml-mir-29b-1 |
| | | 3888 | mml-mir-29b-2 |
| 3509 | mml-miR-29c | 3889 | mml-mir-29c |
| 3510 | mne-miR-29b | 3890 | mne-mir-29b |
| 3511 | ggo-miR-29b | 3891 | ggo-mir-29b-1 |
| | | 3892 | ggo-mir-29b-2 |
| 3512 | ppa-miR-29b | 3893 | ppa-mir-296-1 |
| | | 3894 | ppa-mir-29b-2 |
| 3513 | ptr-miR-29b | 3895 | ptr-mir-29b-1 |
| | | 3896 | ptr-mir-29b-2 |
| 3514 | ppy-miR-29b | 3897 | ppy-mir-29b-1 |
| | | 3898 | ppy-mir-29b-2 |
| 3515 | cfa-miR-29a | 3899 | cfa-mir-29a |
| 3516 | cfa-miR-29b | 3900 | cfa-mir-29b-1 |
| | | 3901 | cfa-mir-29b-2 |
| 3517 | cfa-miR-29c | 3902 | cfa-mir-29c |
| 3518 | mdo-miR-29a | 3903 | mdo-mir-29a |
| 3519 | mdo-miR-29b | 3904 | mdo-mir-9b |
| 3520 | gga-miR-29a | 3905 | gga-mir-29a |
| 3521 | gga-miR-29b | 3906 | gga-mir-29b-1 |
| | | 3907 | gga-mir-29b-2 |
| 3522 | gga-mir-29c | 3908 | gga-mir-29c |
| 3523 | xtr-miR-29a | 3909 | xtr-mir-29a |
| 3524 | xtr-miR-29b | 3910 | xtr-mir-29b |
| 3525 | xtr-miR-29c | 3911 | ctr-mir-29c |
| 3526 | xtr-miR-29d | 3912 | xtr-mir-29d |
| 3527 | bta-miR-29b | 3913 | bta-mir-29b |
| 3528 | bta-miR-290 | 3914 | bta-mir-29c |
| 3529 | ssc-miR-29b | 3915 | ssc-mir-29b |
| 3530 | ssc-miR-29c | 3916 | ssc-mir-29c |
| 3531 | dre-miR-29a | 3917 | dre-mir-29a-1 |
| | | 3918 | dre-mir-29a-2 |
| 3532 | dre-miR-29b | 3919 | dre-mir-29b-1 |
| | | 3920 | dre-mir-29b-2 |
| | | 3921 | dre-mir-29b-3 |
| 3533 | fru-miR-29a | 3922 | fru-mir-29a-1 |
| | | 3923 | fru-mir-29a-2 |
| 3534 | fru-miR-29b | 3924 | fru-mir-29b-1 |
| | | 3925 | fru-mir-29b-2 |
| 3535 | tni-miR-29a | 3926 | tni-mir-29a-1 |
| | | 3927 | tni-mir-29a-2 |
| 3536 | tni-miR-29b | 3928 | tni-mir-29b-1 |
| | | 3929 | tni-mir-29b-2 |
| 3537 | mmu-miR-30a | 3790 | mmu-mir-30a |
| 3538 | mmu-miR-30b | 3930 | mmu-mir-30b |
| 3539 | mmu-miR-30c | 3931 | mmu-mir-30c-1 |
| | | 3932 | mmu-mir-30c-2 |
| 3540 | mmu-miR-30d | 3933 | mmu-mir-30d |
| 3541 | mmu-miR-30e | 3791 | mmu-mir-30e |

TABLE 3-36

| sequence | | sequence | miRNA |
|---|---|---|---|
| number | miRNA name | number | precursor name |
| 3542 | rno-miR-30a | 3792 | rno-mir-30a |
| 3543 | rno-miR-30b-5p | 3934 | rno-mir-30b |
| 3544 | rno-miR-30c | 3935 | rno-mir-30c-1 |
| | | 3936 | rno-mir-30c-2 |
| 3545 | rno-miR-30d | 1919 | rno-mir-30d |
| 3546 | rno-miR-30e | 1920 | rno-mir-30e |
| 3547 | age-miR-30b | 3937 | age-mir-30b |
| 3548 | lla-miR-30b | 3938 | lla-mir-30b |
| 3549 | lla-miR-30c | 3939 | lla-mir-30c |
| 3550 | mml-miR-30a-5p | 1921 | mml-mir-30a |
| 3551 | mml-miR-30b | 3940 | mml-mir-30b |
| 3552 | mml-miR-30c | 3941 | mml-mir-30c-1 |
| | | 3942 | mml-mir-30c-2 |
| 3553 | mml-miR-30d | 3943 | mml-mir-30d |
| 3554 | mml-miR-30e | 3944 | mml-mir-30e |
| 3555 | mne-miR-30b | 3945 | mne-mir-30b |
| 3556 | mne-miR-30c | 3946 | mne-mir-30c |
| 3557 | mne-miR-30d | 3947 | mne-mir-30d |
| 3558 | ggo-miR-30a-5p | 1922 | ggo-mir-30a |
| 3559 | ggo-miR-30b | 3948 | ggo-mir-30b |
| 3560 | ggo-miR-30d | 3949 | ggo-mir-30d |
| 3561 | ppa-miR-30a-5p | 1923 | ppa-mir-30a |
| 3562 | ppa-miR-30b | 3950 | ppa-mir-30b |
| 3563 | ppa-miR-30d | 3951 | ppa-mir-30d |
| 3564 | ptr-miR-30a-5p | 1924 | ptr-mir-30a |
| 3565 | ptr-miR-30b | 3952 | ptr-mir-30b |
| 3566 | ptr-miR-30c | 3953 | ptr-mir-30c |
| 3567 | ptr-miR-30d | 3954 | ptr-mir-30d |
| 3568 | ppy-miR-30a-5p | 1925 | ppy-mir-30a |
| 3569 | cfa-miR-30a | 3955 | cfa-mir-30a |
| 3570 | cfa-miR-30b | 3956 | cfa-mir-30b |
| 3571 | cfa-miR-30c | 3957 | cfa-mir-30c-1 |
| | | 3958 | cfa-mir-30c-2 |
| 3572 | cfa-miR-30d | 3959 | cfa-mir-30d |
| 3573 | mdo-miR-30a | 3960 | mdo-mir-30a |
| 3574 | gga-miR-30a-5p | 1927 | gga-mir-30a |
| 3575 | gga-miR-30b | 3961 | gga-mir-30b |
| 3576 | gga-miR-30c | 3962 | gga-mir-30c-1 |
| | | 3963 | gga-mir-30c-2 |
| 3577 | gga-miR-30d | 3964 | gga-mir-30d |
| 3578 | gga-miR-30e | 3965 | gga-mir-30e |
| 3579 | xtr-miR-30a-5p | 1928 | xtr-mir-30a |
| 3580 | xtr-miR-30b | 3966 | xtr-mir-30b |
| 3581 | xtr-miR-30c | 3967 | xtr-mir-30c-1 |
| | | 3968 | xtr-mir-30c-2 |
| 3582 | xtr-miR-30d | 3969 | xtr-mir-30d |
| 3583 | xtr-miR-30e | 3970 | xtr-mir-30e |
| 3584 | bta-miR-30a-5p | 3971 | bta-mir-30a |
| 3585 | bta-miR-30b | 3972 | bta-mir-30b |
| 3586 | bta-miR-30c | 3973 | bta-mir-30c |
| 3587 | bta-miR-30d | 3974 | bta-mir-30d |
| 3588 | bta-miR-30e-5p | 3975 | bta-mir-30e |
| 3589 | ssc-miR-30c | 3976 | ssc-mir-30c |
| 3590 | dre-miR-30a | 3977 | dre-mir-30a |
| 3591 | dre-miR-30b | 3978 | dre-mir-30b |
| 3592 | dre-miR-30c | 3979 | dre-mir-30c |

TABLE 3-37

| sequence | | sequence | miRNA |
|---|---|---|---|
| number | miRNA name | number | precursor name |
| 3593 | dre-miR-30d | 3980 | dre-mir-30d |
| 3594 | dre-miR-30e | 1929 | dre-mir-30e-2 |
| 3595 | fru-miR-30b | 3981 | fru-mir-30b |
| 3596 | fru-miR-30c | 3982 | fru-mir-30c |
| 3597 | fru-miR-30d | 3983 | fru-mir-30d |
| 3598 | tni-miR-30b | 3984 | tni-mir-30b |
| 3599 | tni-miR-30c | 3985 | tni-mir-30c |
| 3600 | tni-miR-30d | 3986 | tni-mir-30d |
| 3601 | lla-miR-105 | 3987 | lla-mir-105 |
| 3602 | sla-miR-105 | 3988 | sia-mir-105 |
| 3603 | mml-miR-105 | 3989 | mml-mir-105-1 |
| | | 3990 | mml-mir-105-2 |
| 3604 | mne-miR-105 | 3991 | mne-mir-105 |
| 3605 | ggo-miR-105 | 3992 | ggo-mir-105 |
| 3606 | ppa-miR-105 | 3993 | ppa-mir-105 |
| 3607 | ptr-miR-105 | 3994 | ptr-mir-105 |
| 3608 | ppy-miR-105 | 3995 | ppy-mir-105 |
| 3609 | ssc-miR-105-1 | 3996 | ssc-mir-105-1 |
| | | 3997 | ssc-mir-105-2 |
| 3610 | ssc-miR-105-2 | 3996 | ssc-mir-105-1 |
| | | 3997 | sso-mir-105-2 |
| 3611 | age-miR-124a | 3998 | age-mir-124a |
| 3612 | lla-miR-124a | 3999 | lla-mir-124a |
| 3613 | mml-miR-124a | 4000 | mml-mir-124a-1 |
| | | 4001 | mml-mir-124a-2 |
| 3614 | ggo-miR-124a | 4002 | ggo-mir-124a |
| 3615 | ppa-miR-124a | 4003 | ppa-mir-124a |
| 3616 | ptr-miR-124a | 4004 | ptr-mir-124a |
| 3617 | ppy-miR-124a | 4005 | ppy-mir-124a |
| 3618 | mdo-miR-124a | 4006 | mdo-mir-124a-1 |
| | | 4007 | mdo-mir-124a-2 |
| | | 4008 | mdo-mir-124a-3 |
| 3619 | gga-miR-124a | 4009 | gga-mir-124a |
| 3620 | gga-miR-124b | 4010 | gga-mir-124b-1 |
| | | 4011 | gga-mir-124b-2 |
| 3621 | xtr-miR-124 | 4012 | xtr-mir-124 |
| 3622 | bta-miR-124a | 4013 | bta-mir-124a |
| 3623 | ssc-miR-124a | 4014 | ssc-mir-124a |
| 3624 | mmu-miR-150 | 4015 | mmu-mir-150 |
| 3625 | rno-miR-150 | 4016 | rno-mir-150 |
| 3626 | mml-miR-150 | 4017 | mml-mir-150 |
| 3627 | cfa-miR-150 | 4018 | cfa-mir-150 |
| 3628 | xtr-miR-150 | 4019 | xtr-mir-150 |
| 3629 | bta-miR-150 | 4020 | bta-mir-150 |
| 3630 | dre-miR-150 | 4021 | dre-mir-150 |
| 3631 | mmu-miR-154 | 4022 | mmu-mir-154 |
| 3632 | rno-miR-154 | 4023 | rno-mir-154 |
| 3633 | mml-miR-154 | 4024 | mml-mir-154 |
| 3634 | mne-miR-154 | 4025 | mne-mir-154 |
| 3635 | ggo-miR-154 | 4026 | ggo-mir-154 |
| 3636 | ppa-miR-154 | 4027 | ppa-mir-154 |
| 3637 | ptr-miR-154 | 4028 | ptr-mir-154 |
| 3638 | ppy-miR-154 | 4029 | ppy-mir-154 |
| 3639 | mmu-miR-299 | 3807 | mmu-mir-299 |
| 3640 | mml-miR-299-3p | 2112 | mml-mir-299 |
| 3641 | btu-miR-380-5p | 4030 | bta-mir-380 |
| 3642 | mmu-miR-383 | 4031 | mmu-mir-383 |
| 3643 | rno-miR-383 | 4032 | rno-mir-383 |

TABLE 3-38

| sequence | | sequence | miRNA |
|---|---|---|---|
| number | miRNA name | number | precursor name |
| 3644 | mml-miR-383 | 4033 | mml-mir-383 |
| 3645 | cfa-miR-383 | 4034 | cfa-mir-383 |
| 3646 | mdo-miR-383 | 4035 | mdo-mir-383 |
| 3647 | gga-miR-383 | 4036 | gga-mir-383 |
| 3648 | xtr-miR-383 | 4037 | xtr-mir-383 |
| 3649 | mmu-miR-411 | 4038 | mmu-mir-411 |
| 3650 | rno-miR-411 | 4039 | rno-mir-411 |
| 3651 | mml-miR-411 | 4040 | mml-mir-411 |
| 3652 | mmu-miR-423-3p | 4041 | mmu-mir-423 |
| 3653 | rno-miR-423 | 4042 | rno-mir-423 |
| 3654 | mml-miR-423-3p | 4043 | mml-mir-423 |
| 3655 | mmu-miR-433 | 4044 | mmu-mir-433 |
| 3656 | rno-miR-433 | 4045 | rno-mir-433 |
| 3657 | mml-miR-433 | 4046 | mml-mir-433 |
| 3658 | cfa-miR-433 | 4047 | cfa-mir-433 |
| 3659 | mml-miR-454 | 4048 | mml-mir-454 |
| 3660 | dre-miR-454a | 4049 | dre-mir-454a |
| 3661 | dre-miR-454b | 4050 | dre-mir-454b |
| 3662 | mmu-miR-501-5p | 4051 | mmu-mir-501 |
| 3663 | rno-miR-501 | 4052 | rno-mir-501 |
| 3664 | mml-miR-501 | 4053 | mml-mir-501 |
| 3665 | mmu-miR-504 | 4054 | mmu-mir-504 |
| 3666 | mml-miR-504 | 4055 | mml-mir-504 |
| 3667 | mml-miR-506 | 4056 | mml-mir-506 |
| 3668 | pbi-miR-506 | 4057 | pbi-mir-506 |
| 3669 | ptr-miR-506 | 4058 | ptr-mir-506 |
| 3670 | ssy-miR-506 | 4059 | ssy-mir-506 |
| 3671 | mml-miR-507 | 4060 | mml-mir-507 |
| 3672 | pbi-miR-507 | 4061 | pbi-mir-507 |
| 3673 | ptr-miR-507 | 4062 | ptr-mir-507 |
| 3674 | ssy-miR-507 | 4063 | ssy-mir-507 |
| 3675 | ptr-miR-508 | 4064 | ptr-mir-508 |
| 3676 | ssy-miR-508 | 4065 | ssy-mir-508 |
| 3677 | mml-miR-512-3p | 4066 | mml-mir-512-1 |
| | | 4067 | mml-mir-512-2 |
| 3678 | mml-miR-562 | 4068 | mml-mir-562 |
| 3679 | mml-miR-597 | 4069 | mml-mir-597 |
| 3680 | mml-miR-605 | 4070 | mml-mir-605 |
| 3681 | mml-miR-640 | 4071 | mml-mir-640 |
| 3682 | mml-miR-767-5p | 4072 | mml-mir-767 |
| 3683 | mml-miR-770-5p | 4073 | mml-mir-770 |
| 3684 | mml-miR-802 | 4074 | mml-mir-802 |
| 3685 | hsa-miR-29c | 4075 | hsa-mir-29c |
| 3686 | hsa-miR-30c | 4076 | hsa-mir-30c-1 |
| | | 4077 | hsa-mir-30c-2 |
| 3687 | hsa-miR-30d | 3092 | hsa-mir-30d |
| 3688 | hsa-miR-30e | 3093 | hsa-mir-30e |
| 3689 | mmu-miR-384-5p | 4078 | mmu-mir-384 |
| 3690 | rno-miR-384-5p | 4079 | rno-mir-384 |
| 3691 | hsa-miR-563 | 4080 | hsa-mir-563 |
| 3692 | hsa-miR-130a | 3311 | hsa-mir-130a |
| 3693 | hsa-miR-130b | 4081 | hsa-mir-130b |
| 3694 | hsa-miR-301a | 4082 | hsa-mir-301a |
| 3695 | hsa-miR-301b | 4083 | hsa-mir-301b |
| 3696 | mmu-miR-130a | 4084 | mmu-mir-130a |
| 3697 | mmu-miR-130b | 4085 | mmu-mir-130b |
| 3698 | mmu-miR-301a | 4086 | mmu-mir-301a |
| 3699 | mmu-miR-301b | 4087 | mmu-mir-301b |
| 3700 | mmu-miR-721 | 4088 | mmu-mir-721 |

TABLE 3-39

| sequence | | sequence | miRNA |
|---|---|---|---|
| number | miRNA name | number | precursor name |
| 3701 | rno-miR-130a | 4089 | rno-mir-130a |
| 3702 | rno-miR-130b | 4090 | rno-mir-130b |
| 3703 | rno-miR-301a | 4091 | rno-mir-301a |
| 3704 | rno-miR-301b | 4092 | rno-mir-301b |
| 3705 | mml-miR-130a | 4093 | mml-mir-130a |
| 3706 | mml-miR-130b | 4094 | mml-mir-130b |
| 3707 | mml-miR-301a | 4095 | mml-mir-301a |
| 3708 | mml-miR-301b | 4096 | mml-mir-301b |
| 3709 | mne-miR-130a | 4097 | mne-mir-130a |
| 3710 | ggo-miR-130a | 4098 | ggo-mw-130a |
| 3711 | ppa-miR-130a | 4099 | ppa-mir-130a |
| 3712 | cfa-miR-130a | 4100 | cfa-mir-130a |
| 3713 | cfa-miR-130b | 4101 | cfa-mir-130b |
| 3714 | mdo-miR-130a | 4102 | mdo-mir-130a |
| 3715 | gga-miR-130a | 4103 | gga-mir-130a |
| 3716 | gga-miR-130b | 4104 | gga-mir-130b |
| 3717 | gga-miR-301 | 4105 | gga-mir-301 |
| 3718 | xtr-miR-130a | 4106 | xtr-mir-130a |
| 3719 | xtr-miR-130b | 4107 | xtr-mir-130b |
| 3720 | xtr-miR-130c | 4108 | xtr-mir-130c |
| 3721 | xtr-miR-301 | 4109 | xtr-mir-301-1 |
| | | 4110 | xtr-mir-301-2 |
| 3722 | dre-miR-130a | 4111 | dre-mir-130a-1 |
| | | 4112 | dre-mir-130a-2 |
| 3723 | dre-miR-130b | 4113 | dre-mir-130b |
| 3724 | dre-miR-130c | 4114 | dre-mir-130c-1 |
| | | 4115 | dre-mir-130c-2 |
| 3725 | dre-miR-301a | 4 16 | dre-mir-301a |
| | | 4117 | dre-mir-301a-2 |
| 3726 | dre-miR-301b | 4118 | dre-mir-301b |
| 3727 | dre-miR-301c | 4119 | dre-mir-301c |
| 3728 | fru-miR-130 | 4120 | fru-mir-130 |
| 3729 | fru-miR-301 | 4121 | fru-mir-301 |
| 3730 | tni-miR-130 | 4122 | tni-mir-130 |
| 3731 | tni-miR-301 | 4123 | tni-mir-301 |
| 3732 | mmu-miR-124 | 4124 | mmu-mir-124-1 |
| | | 4125 | mmu-mir-124-2 |
| | | 4126 | mmu-mir-124-3 |
| 3733 | rno-miR-124 | 4127 | rno-mir-124-1 |
| | | 4128 | rno-mir-124-2 |
| | | 4129 | rno-mir-124-3 |
| 3734 | cfa-miR-124 | 4130 | cfa-mir-124-1 |
| | | 4131 | cfa-mir-124-2 |
| | | 4132 | cfa-mir-124-5 |
| 3735 | dre-miR-124 | 4133 | dre-mir-124-1 |
| | | 4134 | dre-mir-124-2 |
| | | 4135 | dre-mir-124-3 |
| | | 4136 | dre-mir-124-4 |
| | | 4137 | dre-mir-124-5 |
| | | 4138 | dre-mir-124-6 |
| 3736 | fru-miR-124 | 4139 | fru-mir-124-1 |
| | | 4140 | fru-mir-124-2 |
| | | 4141 | fru-mir-124-3 |
| 3737 | tni-miR-124 | 4142 | tni-mir-124-1 |
| | | 4143 | tni-mir-124-2 |
| | | 4144 | tni-mir-124-3 |
| 3738 | hsa-miR-557 | 4145 | hsa-mir-557 |
| 3739 | mmu-miR-1186 | 4146 | mmu-mir-1186 |
| 3740 | xtr-miR-93b | 4147 | xtr-mir-93b |
| 3741 | hsa-miR-518a-5p | 3359 | hsa-mir-518a-1 |
| | | 3360 | hsa-mir-518a-2 |

[0043] In the present invention, a nucleic acid having an identity of 90% or more to a nucleotide sequence of any one of SEQ ID NOs:1 to 4147 means a nucleic acid having an identity of at least 90% or more, preferably 93% or more, more preferably 95% or more, still more preferably 96% or more, particularly preferably 97% or more, most preferably 98% or more, to a nucleic acid consisting of a nucleotide sequence of any one of SEQ ID NOs:1 to 3371, as calculated using an analytical software program such as BLAST (J. Mol. Biol., 215, 403 (1990)) or FASTA (Methods in Enzymology, 183, 63 (1990)).

[0044] As mentioned above, stringent conditions are conditions that allow signals to be detected by adding to a membrane blotted with one strand the other strand labeled with ³²P-ATP in a hybridization buffer consisting of 7.5 mL, 0.6 mL of 1M Na₂HPO₄ (pH 7.2), 21 mL of 10% SDS, 0.6 mL of 50×Denhardt's solution, and 0.3 mL of 10 mg/mL sonicated salmon sperm DNA, carrying out a reaction at 50° C. overnight, thereafter washing the membrane with 5×SSC/5% SDS liquid at 50° C. for 10 minutes, and further washing the same with 1×SSC/1% SDS liquid at 50° C. for 10 minutes, thereafter taking out the membrane, and applying it to an X-ray film.

[0045] The method of detecting the expression of nucleic acid such as a micro-RNA using a nucleic acid may be any method, as far as the presence of nucleic acid such as a micro-RNA or micro-RNA precursor in a sample can be detected; for example, (1) Northern hybridization, (2) dot blot hybridization, (3) in situ hybridization, (4) quantitative PCR, (5) differential hybridization, (6) microarray, (7) ribonuclease protection assay and the like can be mentioned.

[0046] The method of detecting the amount expressed of a nucleic acid such as a micro-RNA, a mutation of the nucleic acid, or a mutation of the genome that encodes the nucleic acid using a nucleic acid used in the present invention may be any method, as far as it enables detection of a mutation of the nucleotide sequence of a nucleic acid such as a micro-RNA or micro-RNA precursor in a sample; for example, a method comprising detecting a hetero-double-strand formed by hybridization of a nucleic acid having a non-mutated nucleotide sequence and a nucleic acid having a mutated nucleotide sequence, a method comprising directly sequencing a sample-derived nucleotide sequence to detect the presence or absence of a mutation, and the like can be mentioned.

[0047] The vector that expresses a nucleic acid used in the present invention may be any vector, as far as it has been designed to biosynthesize a nucleic acid, such as a micro-RNA, used in the present invention, when introduced to, and transcribed in, a cell. As vectors capable of expressing a nucleic acid, such as a micro-RNA, used in the present invention in cells, specifically, pcDNA6.2-GW/miR (manufactured by Invitrogen Company), pSilencer 4.1-CMV (manufactured by Ambion Company), pSINsi-hH1 DNA (manufactured by Takara Bio Company), pSINsi-hU6 DNA (manufactured by Takara Bio Company), pENTR/U6 (manufactured by Invitrogen Company) and the like can be mentioned.

[0048] The method of suppressing the expression of a gene having a target nucleotide sequence for a nucleic acid, such as a micro-RNA, used in the present invention (hereinafter also referred to as a target gene) may be any method, as far as it suppresses the expression of a gene having the target nucleotide sequence. Here, to suppress the expression encompasses a case where the translation of an mRNA is suppressed, and a case where cleavage or degradation of an mRNA results in a decreased amount of protein translated from the mRNA. As substances that suppress the expression of an mRNA having the target nucleotide sequence, specifically nucleic acids such as siRNAs and antisense oligonucleotides can be mentioned. The siRNAs can be prepared on the basis of information on the continuous sequence of the mRNA (Genes Dev., 13, 3191 (1999)). The number of nucleotide residues constituting one strand of the siRNA is preferably 17 to 30 residues, more preferably 18 to 25 residues, still more preferably 19 to 23 residues.

[0049] Micro-RNAs used in the present invention also include an artificial micro-RNA that is a single-stranded RNA 17 to 28 nucleotides long, comprising a sequence complementary to a 7-nucleotide continuous sequence present in a gene (target gene) having a target nucleotide sequence for a micro-RNA of any one of SEQ ID NOs:1 to 1543 and 3372 to 3741 as the 2nd to 8th nucleotides. In case of an RNA comprising an artificial micro-RNA sequence extended anteriorly and posteriorly to form a hairpin structure, wherein the micro-RNA sequence can be cut out from either one strand of the hairpin structure by the biosynthetic pathway of the micro-RNA in the cell, the extended sequence is called an artificial micro-RNA precursor. With the gene whose expression is to be suppressed as a target gene, it is possible to design artificial micro-RNAs and artificial micro-RNA precursors using the method described above.

[0050] A target nucleotide sequence for a micro-RNA refers to the nucleotide sequence of a nucleic acid consisting of several nucleotides recognized by a micro-RNA used in the present invention, wherein the expression of the mRNA having the nucleotide sequence is suppressed by the micro-RNA. Because an mRNA having a nucleotide sequence complementary to the 2nd to 8th nucleotides from the 5′-end of a micro-RNA undergoes suppression of the translation thereof by the micro-RNA (Current Biology, 15, R458-R460 (2005)), a nucleotide sequence complementary to the 2nd to 8th nucleotides from the 5-end of a micro-RNA used in the present invention can be mentioned as a target nucleotide sequence of the micro-RNA. For example, by providing a target sequence complementary to the 2nd to 8th nucleotides on the 5′ terminal side of a micro-RNA, and selecting an mRNA comprising a sequence completely identical to a set of 3′ UTR nucleotide sequences of human mRNAs by a method such as character string search, the target nucleotide sequence can be determined. A set of 3′ UTR nucleotide sequences of human mRNAs can be prepared using information on genomic sequences and gene positions that can be acquired from “UCSC Human Genome Browser Gateway (http://genome.ucsc.edu/cgi-bin/hgGateway)”.

[0051] As specific examples of genes having a target nucleotide sequence of a micro-RNA of any one of SEQ ID NOs:1 to 1543 and 3372 to 3741, the genes shown in Table 4-1 to Tables 4 to 148, represented by names (Official Symbols and Gene IDs) used in the EntreGene database (http://www.ncbi.nlm.nih.gov/Entrez/) of the US National Center for Biotechnology Information (NCBI), can be mentioned.

TABLE 4-1

| | sequence number of | |
|---|---|---|
| | mRNA having sequence | |
| | with the same 2nd to | |
| | 8th nucleotides on | |
| human MiRNA | 5′ terminal side | genes having target nucleotide sequence at 3′UTR |
| hsa-miR-16 | 1; 151; 152; 153; 154; | SAMD11(148398); FAM79A(127262); KIF1B(23095); CDC42(998); |
| hsa-miR-195 | 165; 156; 167; 158; 159; | WDTC1(23038); EIF2C4(192670); DNAJB4(11080); C10rf60(65123); |
| | 160; 161; 162; 163; 164; | FDPS(2224); PPP1R12B(4660); C1orf107(27042); CASZ1(54897); |
| | 165; 166; 167; 3407; 168; | MTHFR(4524); LUZP1(7798); IL28RA(163702); PAFAH2(6051); |
| | 169; 170; 171; 172; 173; | ZMYM6(9204); KIAA0319L(79932); UBE2Q1(55585); DEDD(9191); |
| | 2; 174; 175; 176; 177; | NUCKS1(64710); LOC91461(91461); EPB41L5(57669); PLEKHB2(55041); |
| | 178; 179; 180; 1238; | ACVR2A(92); NRP2(8828) ASB1(51665); ATG4B (23192); |
| | 1239; 1240; 1241; 1242; | ING5(84289); ORC4L(5000); TUBA1(7277); FLJ20701(55022); |
| | 1243; 1244; 1246; 1246; | IL17RE(132014); LIMD1(8994); KLHL18(23276); PLXNA1(5361); |
| | 1247; 1248; 1249; 1250; | SRPRB(58477); SPSB4(92369); GMPS(8833) ; CHRD(8646); |
| | 1251; 1252; 1253; 1254; | ZFYVE20(64145); IHPK1(9807); CAMKV(79012); CD80(941); |
| | 1255; 1256; 1257; 1258; | TMCC1(23023); PLSCR4(57088); TBL1XR1(79718); MASP1(5648); |
| | 1259; 1260; 1261; 1262; | WHSC1(7468); SEPT11(55752); FGF2(2247); RASGEF1B(153020); |
| | 1263; 1264; 1265; 1266; | FLJ37543(285668); PHF15(23338); SLC36A1(206358); SGCD(6444); |
| | 1267; 1268; 1269; 1270; | LSM11(134353); ARL10(285598); PPAP2A(8611); FLJ14166(79616); |
| | 1271; 1272; 1273; 1274; | FLJ45422(441140); PPT2(9374); GRM1(2911); RP11-145H9.1 |
| | 1275; 1276; 1277; 1278; | (340156); TFAP2A(7020); GABBR1(2550); HS3ST5(222537); |
| | 1279; 1280; 1281; 1282; | LATS1(9113); FOXK1(221937); LOC441257(441257); BCAP29(55973); |
| | 1283; 1284; 1285; 1286; | ARHGEF5(7984); CACNA2D1(781); DLGAP2(9228); ATP6V1B2(526); |
| | | TACC1(6867); FLJ46365(401459); RAB11FIP1(80223); FGFR1(2260); |
| | | ST3GAL1(6482); PPAPDC2(403313); NTRK2(4915); C9orf91(203197); |
| | | PAPPA(5069); FREQ(23413); ZBTB5(9925); IPPK(64768); |
| | | PTCH(5727); TRIM14(9830); EPB41L4B(54566); PHF19(26147); |
| | | TSC1(7248); C10orf42(90550); PCGF5(84333); ENTPD7(57089); |
| | | LRRC27(80313); GDI2(2665); C10orf54(64115); KCNMAI(3778); |
| | | CPEB3(22849); HPSE2(60495); MGC45840(283229); TEAD1(7008); |
| | | TMEM16C(63982); KIAA0652(9776); ARL2(402); CDC42EP2(10485); |
| | | SAPS3(55291); FLJ23514(60494); MUCDHL(53841); |
| | | SLC25A22(79751); KCNJ11(3767); SLC1A2(6506); TRAF6(7189); |
| | | ZNF289(84364); CYBASC3(220002); FLJ12529(79869); NUMA1(4926); |
| | | RAB30(27314); FZD4(8322); CLEC2D(29121); DDX11(1663); |
| | | DAZAP2(9802); PFDN5(5204); RBMS2(5939); KIAA1853(84530); |
| | | SLC11A2(4891); SPRYD3(84926); CTDSP2(10106); LIN7A(8825); |
| | | C12orf30(80018); FBXO21(23014); CHFR(55743); EXOSC8(11340); |
| | | DCAMKL1(9201); HTR2A(3356); BCL2L2(599); KIAA0247(9766); |
| | | LOC400258(400258); PACS2(23241); TM9SF1(10548); |
| | | C14orf43(91748); KIAA0317(9870); FAM63B(54629); SNX1(6642); |
| | | ZNF609(23060); THSD4(79875); ARIH1(25820); ABHD2(11057); |
| | | MAN2A2(4122); IGF1R(3480); PRTG(283659); CALML4(91860); |
| | | UBPH(56061); NFATC3(4775); SNTB2(6645); CYB5B(80777); |
| | | RPL13(6137); TMEM8(58986); TK2(7084); CMTM4(146223); SLC12A4(656 |

TABLE 4-2

| | | |
|---|---|---|
| | | 0); PAFAH1B1(5048); CPD(1362); RAPGEFL1(51195); DHX8(1659); |
| | | LOC388389(388389); SCARF1(8578); MNT(4335); KIAA0664(23277); |
| | | GAS7(8522); GFAP(2670); GRB2(2885); TBC1D16(125058); |
| | | ARHGDIA(396); C17orf62(79415); SEH1L(81929); C18orf1(753); |
| | | ILF3(3609); RPL28(6158); C19orf6(91304); INSR(3643); CYP4F11 |
| | | (57834); ELL(8178); LASS1(10715); YIF1B(90522); CAPN12(147968); |
| | | LIPE(3991); DMPK(1760); FLJ36070(284358); TGIF2(60436); |
| | | C20orf77(58490); C20orf121(79183); KCNK15(60598); CD40(958); |
| | | SLC9A8(23315); VAPB(9217); RNF24(11237); NES1(9054); C20orf117 |
| | | (140710); SLC13A3(64849); UBE2V1(7335); BTBD4(140685); |
| | | SLC5A3(6526); SYNJ1(8867); SNF1LK(150094); SEPT5(5413); |
| | | CRKL(1399); NF2(4771); DEPDC5(9681); TNRC6B(23112); NUP50 |
| | | (10762); FLJ20699(55020); FLJ21125(79680); HTF9C(27037); |
| | | CBX6(23466); USP9X(8239); EDA(1896); OGT(8473); ZBTB33(10009); |
| | | CXorf6(10046); RPS6KA3(6197); WNK3(65267); APLN(8862); |
| hsa-miR-17-3p | 3; 3408; 181; 182; 183; | SLC30A7(148867); PPP1R12B(4660); C1orf181(54680); C1orf183 |
| | 184; 185; 186; 187; | (55924); AKT3(10000); MRPL30(51263); HNRPA3(220988); CAPN10 |
| | 188; 189; 190; 191; | (11132); MGAT4A(11320); LARS2(23395); PARP14(54625); ATP11B |
| | 3409; 192; 193; 194; | (23200); MAP4(4134); FOXP1(27086); TRIM59(286827); |
| | 195; 3410; 1287; 1288; | DITZP564O0823(25849); KIAA1727(85462); MAML3(55534); FSTL4 |
| | 1289; | (23105); ANKRD6(22881); NUDT3(11165); LPAL2(80350); CASP2 |
| | | (835); PLAG1(5324); REXO1L1(254958); NTRK2(4915); TGFBR1 |
| | | (7046); ANGPTL2(23452); ARL3(403); SH3PCD2A(9644); TUB(7275); |
| | | PPP2R1B(5519); TSPAN9(10867); LRRC23(10233); ARID2(196528); |
| | | HMGA2(8091); RAD52(5893); CACNA2D4(93589); RAB35(11021); |
| | | RAP2A(5911); JPH4(84502); DICER1(23405); Gcom1(145781); |
| | | RAB11A(8766); SCAND2(54581); AP3S2(10239); LINS1(55180); |
| | | TM2D3(80213); NFATC3(4775); KIAA0513(9764); C16orf55(124045); |
| | | ERN2(10595); Pfs2(51659); FLJ12998(64779); NXPH3(11248); |
| | | TOM1L2(146691) ; PIP5K2B(8395); ACOX1(51); RAB12(201475); |
| | | HRH4(59340); APOE(348); HIF3A(64344); ZNF558(148156); |
| | | ZNF537(57616); NF2(4771); MSL3L1(10943); PDHA1 (5160); OGT |
| | | (8473); CHM(1121); |
| hsa-miR-18a | 4; 195; 217; 197; 198; | C1orf93(127281); DNAJC16(23341); PRKACB(5567); SLC30A7(148867); |
| hsa-miR-18b | 199; 200; 201; 218; | RUNX3(864); TMED5(50999); F3(2152); SORT1(6272); FAIM3(9214); |
| | 202; 203; 204; 205; | TAF5L(27097); MRPL35(51318); CCNT2(905); CASP10(843); |
| | 206; 207; 208; 209; | CAB89(51719); ASXL2(55252); OGG1(4968); C3or156(285311); |
| | 219; 3411; 210; 220; | EIF2A(83939); SEC22L3(9117); CDCP1(64866); KIAA2018(205717); |
| | 211; 221; 212; 213; | MASP1(5648); LETM1(3954); GABRA4(2557); KIAA1909(153478); |
| | 222; 214; 215; 216; | ITGA2(3673); ERGIC1(57222); FLJ25680(134187); ALDH5A1(7915); |
| | 5; | BTN1A1(696); PACSIN1(29993); ESR1(2099); NEDD9(4739); |
| | | C6orf106(64771); MDGA1(266727); CDC2L6(23097); ZDHHC4(55146); |
| | | ADCY1(107); ZNF655(79027); KGNS2(3788); KIAA0 |

TABLE 4-3

| | | |
|---|---|---|
| | | 143(23167); PHF20L1(51105); DENND3(22898); ZFP41(286128); |
| | | PAG1(55824); MGC21881(389741); FCMD(2218); ABL1(25); TMEM2 |
| | | (23670); PHF19(26147); TSC1(7248); WDR37(22884); PI4K11(55361); |
| | | GPR26(2849); KLF6(1316); SAR1A(56681); KCNMA1(3778); |
| | | SEC31L2(25956); MKI67(4288); KIAA0999(23387); CCND2(894); |
| | | PLXNC1(10154); ZNF84(7637); AVIL(10677); CAMKK2(10645); |
| | | WASF3(10810); DLST(1743); DICER1(23405); SMAD3(4088); |
| | | KIAA1794(55215); CA12(771); AP3S2(10239); KIAA0182(23199); |
| | | XYLT1(64131); ADAM11(4185); ABCC3(8714); WDR68(10238); |
| | | NUFIP2(57532); HAP1(9001); LOC201181(201181); FAM104A(84923); |
| | | ATP9B(374868); NFATC1(4772); DSC1(1823); MARK4(57787); SLC39A3 |
| | | (29985); SOX12(6666); PSMF1(9491); C20or1121(79183); |
| | | C20or159(63910); RNF24(11237); SLC23A2(9962); ZHX3(23051); |
| | | PTPRT(11122); SLC5A3(6526); SIM2(6493); AGPAT3(56894); RAB36 |
| | | (9609); TNRC6B(23112); RBM9(23643); KLHL15(80311); |
| hsa-miR-20b | 6; 3412; 223; 224; | FNBP1L(54874); IPO9(55705); FLVCR(28982); DFFA(1676); E2F2 |
| | 3413; 225; 226; | (1870); ENSA(2029); CTSS(1520); ISG20L2(81875); C1orf24(116496); |
| | 227; 228; 229; 230; | YOD1(55432); PGBD5(79605); UBXD4(165324); DPYSL5(56896); |
| | 231; 232; 233; 234; | MGC5509(79074); CYBRD1(79901); ZAK(51776); BMPR2(659); |
| | 235; 236; 237; 238; | CREB1 (1385); MYT1L(23040); FLJ14397(84866); RNF149(284996); |
| | 239; 240; 241; 242; | GPR155(151556); NR2C2(7182); SEC22L3(9117); FYCO1(79443); |
| | 243; 244; 245; 246; | TMEM113(80335); MGC40579(266356); EIF5A2(56648); WHSC1(7468); |
| | 247; 248; 249; | PKD2(5311); PDLIM5(10611); LRPAP1(4043); USP46(64854); |
| | | EPHA5(2044); ASAHL(27163); MGC33302(256471); SLC7A11(23657); |
| | | LOC152485(152485); KIAA1909(153478); SERF1A(8293); |
| | | ARHGAP26(23092); G3BP(10146); LSM11(134353); SEMA5A(9037); |
| | | FLJ25680(134187); IRF1(3659); PANK3(79646); KIAA1191(57179); |
| | | KIAA1919(91749); NUDT3(11165); DKFZP686A10121(85865); |
| | | GATAD1(57798); ZKSCAN1(7586); NOM1(64434); TMED4(222068); |
| | | HIP1(3092); RABL5(64792); NAPE-PLD(222236); FLJ13576(64418); |
| | | PIWIL2(55124); SGK3(23678); PPP1R3B(79660); RAB11FIP1(80223); |
| | | FGFR1(2260); PAG1(55824); PDCD1LG2(80380); C9orf47(286223); |
| | | FAM102A(399665); DHTKD1(55526); POLR3A(11128); PRRG4(79056); |
| | | KIAA1377(57562); C11orf1(64776); PGM2L1(283209); FGD4(121512); |
| | | ERBB3(2065); GTF2H3(2967); LOC283537(283537); KATNAL1(84056); |
| | | KLF12(11278); RNF31(55072); CHURC1(91612); C14orf153(84334); |
| | | SPTLC2(9517); BCL11B(64919); ABHD2(11057); NFATC2IP(84901); |
| | | SPN(6693); MARVELD3(91862); FTS(64400); DYNC1LI2(1783); |
| | | PNP0(55163); IGF2BP1(10642); PRR11(55771); SSTR2(6752); |
| | | ZBTB4(57659); STAT3(6774); GJA7(10052); TNFAIP8L1(126282); |
| | | LDLR(3949); F2RL3(9002); SPIB(6689); ZNF264(9422); |
| | | SFRS14(10147); OPA3(80207); ZFPL(162967); POFUT1(23509); |
| | | C20orfl21(79183); RAB22A(5740 |

TABLE 4-4

| | | |
|---|---|---|
| | | 3); C20orf117(140710); PTPRT(11122); ZNFX1(57169); GM632(57473); |
| | | ADARB1(104); BRWD1(54014); TNRC6B(23112); LOC63929(63929); |
| | | PPARA(5465); PCYT1B(9468); RNF12(51132); |
| hsa-miR-21 | 7; 250; 251; 252; | FAM79A(127262); SGIP1(84251); MAN1A2(10905); FMO2(2327); |
| | 253; 254; 255; 256; | RASAL2(9462); RALGPS2(55103); PFKFB2(5208); FUBP1(8880); |
| | 257; 258; 259; 260; | TSPAN2(10100); KCNJ10(3766); ZBTB41(360023); YOD1(55432); |
| | 261; 262; 263; 264; | ENAH(55740); SFT2D3(84826); GPD2(2820); BMPR2(659); SUPT7L |
| | 265; 266; 267; | (9913); FLJ10081(55683); FLJ10996(54520); ZNF621(285268); |
| | 1290; 1291; 1292; | ZNF662(389114); PTPRG(5793; ZNF654(55279); NEK11(79858); |
| | | SATB1(6304); THRB(7068); MGC40579(256356); RBPSUH (3516); |
| | | PDLIM5(10611); WWC2(80014); MLR1(254251); CHR415SYT(401135); |
| | | DKK2(27123); SKP2(6502); PIK3R1(5295); LOC133619(133619); |
| | | LOC90624(90624); CNOT6(57472); MTMR12(54545); LIFR |
| | | (3977); FLJ25680(134187); DNAJC18(202052); GABRB2(2561); |
| | | MYO6(4646); NT5E(4907); FOXO3A(2309); AKAP7(9465); TBPL1 |
| | | (9519); AKAP12(9590); BVES(11149); LATS1(9113); PHF14(9678); |
| | | CREB5(9586); LAT2(7462); KRIT1(889); SAMD9(54809); PPP1R3A |
| | | (5506); MTPN(136319); ZNF705CP(389631); SGK3(23678); C8orf77 |
| | | (286103); PPP1R3B(79660); PLAG1(5324); IMPAD1(54928); ZNF704 |
| | | (619279); PAG1(55824); RBM12B(369677); SETX(23064); EIF4EBP2 |
| | | (1979); VCL(7414); ENTPD7(57089); PLEKHA1(59338); |
| | | NUDT5(11164); CPEB3(22849); HIPK3(10114); YAP1(10413); CTSC |
| | | (1075); FLJ22028(79912); RAB21(23011); ZNF10(7556); SOX5(6660); |
| | | ZBTB39(9880); ANKS1B(56899); ATXN2(6311); KBTBD6(89890); |
| | | KBTBD7(84078); FLJ10154(55082); GNG2(54331); RAD51LI(5890); |
| | | NRXN3(9369); WDR22(8816); SLC8A3(6547); NARG2(79664); |
| | | C16orf5(29966); SUZ12(23512); IGF2BP1(10642); STAT3(6774); |
| | | MALT1(10892); GIPC3(126326); PLEKHG2(64857); LOC390980 |
| | | (390980); RAB22A(57403); HIC2(23119); TIMP3(7078); KDELR3 |
| | | (11015); RP5-1104E15.5(54471); TNRC6B(23112); PPARA(5465); |
| | | MSL3L1(10943); PRRG1(5638); RP2(6102); PGK1(5230); KAL1 |
| | | (3730); TRAPPC2(6399); SCML2(10389); GPR64(10149); |
| hsa-miR-24 | 8; 268; 269; 270; | FBLIM1(54751); ZDHHC18(84243); CYB561D1(284613); LMNA |
| | 271; 272; 273; 274; | (4000); ADORA1(134); MTHFR(4524); TTMB(399474); ENSA(2029); |
| | 275; 276; 277; 278; | KIF21B(23046); ZAP70(7535); DNAJB2(3300); CAPN10(11132); |
| | 3414; 279; 280; | BOK(666); ADD2(119); FLJ10996(54520); LIMD1(8994); SRGAP3 |
| | 281; 282; 283; 284; | (9901); WHSC1(7468); HERC3(8916); LRPAP1(4043); PHF15(23338); |
| | | REEP2(51308); NDST1(3340); N4BP3(23138); C5orf20(140947); |
| | | BTN3A2(11118); C6orf149(57128); FOXK1(221937); EMID2(136227); |
| | | NUDCD3(23386); RHOBTB2(23221); RHPN1(114822); KIAA1875(340390); |
| | | ZNF704(619279); REX01L1(254968); USP20(10868); |
| | | ADAMTS13(11093); FLJ36268(401563); TOR2A(27433); LRRC20(55222); |
| | | SH3PXD2A(9644); SPRN(503542); KCNQ1(3784); C |

TABLE 4-5

DC42EP2(10435); IGF2(3481); ACVR1B(91); KIAA0152(9761); TCF1
(6927); WDR23(80344); RNF31(55072); SSTR1(6751); KIAA0247
(9766); LOC400258(400258); PRIMA1(145270); SCAMP5 (192683);
ACSBG1(23205); AP3S2(10239); LASS3(204219); RAB40C (57799);
PSKH1(5681); CHST4(10164); XYLT1(64131); CMTM4(146223);
RBM35B(80004); Pfs2(51659); PNPO(55163); BAIAP2(10458);
GAS7(8522); CACNB1(782); C17orf62(79415); GIPC3(126326); ILF3
(3609); RANBP3(8498); RASGRP4(115727); FLAT13265(79935);
PTPNS1(140885); ENTPD6(955); RTEL1(51750); C20orf117(140710);
PDXK(8566); HIC2(23119); PPIL2(23759); SUSD2(56241); CTB-
1048E9.5(402055); LIMK2(3985); FLJ22349(79879); YPEL1(29799);
PPM1F(9647); FLJ41993(400935); OGT(8473); SLC16A2(6567);
CENTB5(116983); ATAD3B(83858); PLCL4(9651); KLHL21(9903);
H6PD(9563); SPSB1(80176); CTNNBIP1(56998); CLCN6(1185);
ATP13A2(23400); KIAA0090(23065); SEPN1(57190); PAQR7(164091);
XKR8(55113); SDC3(9672); SERINC2(347735); C1orf91(56063);
BSDC1(55108); RBBP4(5928); HPCA(3208); TRIM62(55223);
SNIP1(79753); YRDC(79693); MTF1(4520); INPP5B(3633);
MFSD2(84879); CITED4(163732); MED8(112950); PTPRF(5792);
MAST2(23139); ATPAF1(64756); KIAA0494(9813); RNF11(26994);
PCSK9(255738); LEPROT(54741); HHLA3(11147); SEP15(9403);
HIPK1(204851); SYT6(148281); DENND2C(163259); GPR89A(51463);
CGN(57530); RORC(6097); SPRR1A(6698); SLC39A1(27173);
DCST2(127579); SEMA4A(64218); UHMK1(127933); SLC19A2(10560);
FAM20B(9917); STX6(10228); C1orf21(81563); RNF2(6045);
DKFZp434B1231(91156); SYT2(127833); PRELP(5549); CNTN2(6900);
TMCC2(9911); MAPKAPK2(9261); C1orf107(27042); DTL(51514);
ANGEL2(90806); C1orf115(79762); ENAH(55740); COG2(22796);
C1orf198(84886); FLJ13305(84140); RNASEH1(246243);
HPCAL1(3241); SLC5A6(8884); UCN(7349); PPM1G(5496); KIAA1414
(54497); SFXN5(94097); REEP1(65055); CHST10(9486); GPR45
(11250); MGC10993(80775); WDR33(55339); LOC130074(130074);
GPR155(151556); KIAA1715(80856); ALS2CR2(55437); ALS2
(57679); TNS1(7145); IL8RA(3577); MGC42174(129563); PER2
(8864); ANKMY1 (51281); RNPEPL1(57140); ING5(84289); KLHL23
(151230); MGC40579(256356); C3orf29(64419); TTLL3(26140);
IQSEC1(9922); NUP210(23225); SGOL1(151648); CMTM6(54918);
CCR2(1231); KIF9(64147); CDC25A(993); TCTA(6988); BSN(8927);
CISH(1154); NEK4(6787); IL17RB(55540); MAGI1(9223); CCDC52
(152185); KIAA2018(205717); KIAA1407(57577); QTRTD1(79691);
NR1I2(8856); CD86(942); CCDC58(131076); SLC41A3(54946);
TSC22D2(9819); DVL3(1857); MASP1(5648); DGKQ(1609); SLC26A1
(10861); SPON2(10417); WFS1(7466); PPP2R2C(5522); HTRA

TABLE 4-6

3(94031); FLJ20280(54876); PDGFRA(5156); FRAS1(80144); PAQR3
(152559); LRAT(9227); KENAE(202243); LOC134145(134145);
FAM105B(90268); MTMR12(54545); NLN(57486); F2RL2(2151);
MGC33214(153396); TCF7(6932); DDX46(9879); PCDHGB4(8641);
DIAPH1(1729); PCDH1(5097); CDX1(1044); SLC6A7(6534);
GALNT10(55568); ADAM19(8728); SH3PXD2B(285590); BNIP1(662);
TSPAN17(26262); PDLIM7(9260); ADAMTS2(9509); CNOT6(57472);
SSR1(6745); ELOVL2(54898); ALDH5A1(7915); TNF(7124);
LY6G6C(80740); AGPAT1(10554); TAPBP(6892); PACSIN1(29993);
MAPK13(5603); PIM1(5292); FOXP4(116113); KLHDC3(116138);
SRF(6722); TRAM2(9697); FBXO9(26268); SESN1(27244); MAP7
(9053); GPR126(57211); TRIM50C(378108); FLJ20397(54919);
IQCE(23288); TTYH3(80727); GNA12(2768); Ells1(222166);
KIAA0241(23080); EPDR1(54749); STARD3NL(83930); UBE2D4(51619);
OGDH(4967); LIMK1(3984); TRIM50B(375593); FGL2(10875);
SRI(6717); ASB4(51666); CPSF4(10898); GATS(352954); PERQ1
(64599); RABL5(64792); TSPAN33(340348); FLJ14803(84928);
EXOC4(60412); ATP6V0E2L(155066); MTMR9(66036); HR(55806);
C8orf58(541565); BIN3(55909); NEF3(4741); BNIP3L(665); ZNF395
(55893); RC74(55756); IKBKB(3551); BHLHB5(27319); TP53INP1
(94241); PABPC1(26986); BAALC(79870); PHF20L1(51105); ZFP41
(286128); PYCRL(65263); GRINA(2907); GPR172A(79581);
KIAA1688(80728); C9orf93(203238); CNTFR(1271); GBA2(57704);
GNE(10020); TRPM6(140803); SPIN(10927); EDG3(1903); PTPDC1
(138639); FANCC(2176); C9orf97(158427); ZNF483(158399); ZFP37
(7539); AKNA(80709); DFNB31(25861); TRAF1(7185); NEK6(10783);
NR5A1(2516); C9orf28(89853); C9orf90(203245); C9orf74(81605);
ZYG11BL(10444); CRAT(1384); SETX(23064); SURF5(6837);
LCN12(286256); SECISBP2(79048); WDR37(22884); IL15RA(S601);
IL2RA(3559); C10orf30(222389); PIP5K2A(5305); NRP1(8829);
ZNF248(57209); CCDC6(8030); ARID5B(84159); DNAJB12(54788);
USP54(159195); KCNMA1(3778); POLR3A(11128); C10orf56
(219654); TSPAN14(81619); C10orf13(143282); RP11-529I10.4
(25911); FAM45B(55855); FGFR2(2263); ADAM8(101); AP2A2(161);
TUB(7275); NAV2(89797); LDLRAD3(143458); TTC17(55761); HSD17B12
(51144); MAPK8IP1(9479); KIAA0652(9776); LRP4(4038);
FLJ20487(54949); TTC9C(283237); MEN1(4221); KIAA0404(23130);
LOC283130(283130); KLC2(64837); ALDH3B2(222); IGHMBP2
(3508); ARHGEF17(9828); PPME 1(51400); SERPINH1(871); WNT11
(7481); LRRC32(2615); PHCA(55831); LOC283219(283219);
FUT4(2526); SLC35F2(54733); PCSK7(9159); BLR1(643); TRAPPC4
(51399); H2AFX(3014); BTBD15(29068); ADAMTS15(170689);
NRIP2(83714); VWF(7450); PLEKHG6(55200); TNFRSF1A(7132);

TABLE 4-7
SPSB2(84727); ENO2(2026); PHC1(1911);
M6PR(4074); CDKN1B(1027); DDX11(1663);
SLC2A13(114134); NELL2(4753); LMBR1L(55716);
AQP2(359); GPD1(2819); SLC11A2(4891);
POU6F1(5463); LOC57228(57228); PRR13(54458);
MBD6(114785); DKFZP586D0919(25895);
MON2(23041); DYRK2(8445); IFNG(3458);
SLC35E3(55508); MMAB(326625); PXN(5829);
C12orf43(64897); BCL7A(605); HIP1R(9026);
ABCB9(23457); SETD8(387893); SCARB1(949);
AACS(65985); TMTC1(83857); ATP8A2(51761);
SLC7A1(6541); PCDH17(27253); HS6ST3(266722);
TMTC4(84899); F7(2155); GAS6(2621);
BCL2L2(599); KIAA0323(23351);
C14orf108(55745); SPTB(6710); FNTB(2342);
DPF3(8110); ABCD4(5826); NEK9(91754);
ANGEL1(23357); POMT2(29954); TSHR(7253);
GPR68(8111); CCNK(8812); WDR25(79446);
WDR20(91833); C14orf2(9556); KIAA0284(283638);
GPR132(29933); PACS2(23241); KIAA0317(9870);
HERC2(8924); C15orf45(641318); AQR(9716);
BMF(90427); CCDC32(90416); MAPKBP1(23005);
TPM1(7168); RASL12(51285); BRUNOL6(60677);
ADPGK(83440); LSM16(80153); CSK(1445);
CPLX3(594855); MPI(4351); C15orf39(56905);
NEIL1(79661); C15orf27(123591); RCN2(5955);
ARNT2(9915); ADAMTSL3(57188); SCAND2(54581);
WDR73(84942); ABHD2(11057); C15orf42(90381);
FURIN(5045); HDDC3(374659);
DKFZp434I1020(196968); MTIE(4493);
C16orf9(83986); EGS11(8786); SOLH(6650);
KIAA1924(197335); CHTF18(63922);
CACNA1H(8912); TRAF7(84231); PRSS33(260429);
PRSS21(10942); DNASE1(1773); PMM2(5373);
MYH11(4629); GGA2(23062); SBK1(388228);
SPN(6693); RNF40(9810); MT1M(4499);
CMTM3(123920); RANBP10(57610);
C16orf56(80152); HAS3(3038); CHST6(4166);
WWOX(51741); KIAA0513(9764);
FAM38A(9780); ANKRD11(29123); SNN(8303);
KATNB1(10300); TUSC5(286753); CTNS(1497);
ATP2A3(489); DHX33(56919); MPDU1(9526);
ATP1B2(482); MAPK7(5598); KSR1(8844);
SLC13A2(9058); SEZ6(124925); GIT1(28964);
DKFZp667M2411(147172); ACACA(31);
SOCS7(30837); STAT5B(6777); MLX(6945);
AOC3(8639); BRCA1(672); SLC4A1(6521);
GFAP(2670); PLEKHM1(9842); MAPT(4137);
ITGB3(3690); DLX3(1747); CROP(51747);
BZRAP1(9256); PPM1D(8493); LIMD2(80774);
PRKCA(5578); FADS6(283985); KCTD2(23510);
KIAA0195(9772); CASKIN2(57513); RECQL5(9400);
MXRA7(439921); NPTX1(4884); DUS1L(64118);
ITGA2B(3674); PRR11(55771); HOXB7(3217);
L3MBTL4(91133); CEP192(55125); RNF138(51444);
PSTPIP2(9050); SERPINB8(5271); PRG2(79948);
CNN2(1265); MIDN(90007); TCF3(6929);
DOT1L(84444); SLC39A3(29985); NCLN(56926);
SH3GL1(6455); M6PRBP1(10226); CD209(30835);
MAP2K7(5609); FBXL12(54850); RAB3D(9545);
LPPR2(64748); BRD4(23476); ELL(8178);
ZNF93(81931); UPK1A(110

TABLE 4-8

| | | |
|---|---|---|
| | | 45); PAK4(10298); SAMD4B(55095); IXL(55588); ITPKC(80271); |
| | | CEACAM4(1089); CEACAM3(1084); APOE(348); DHX34(9704); |
| | | FLJ32926(93233); RCN3(57333); BCL2L12(83596); KLK2(3817); |
| | | OSCAR(126014); LILRB4(11006); SUV420H2(84787); ZNF471(57573); |
| | | ZNF71(58491); FLJ38288(284309); ZNF587(84914); MGC2752(65996); |
| | | RAB4B(53916); UBOX5(22888); ADAM33(80332); C20orf29(55317); |
| | | C20orf42(55612); PLAGL2(5326); POFUT1(23509); KIF3B(9371); |
| | | TRPC4AP(26133); MANBAL(63905); L3MBTL(26013); RIMS4(140730); |
| | | TOMM34(10953); ELMO2(63916); PRECBP1(23613); SLC9A8(23315); |
| | | STX16(8675); DIDO1(11083); COL20A1(57642); STMN3(50861); |
| | | TNFRSF6B(8771); AGPAT3(56894); RBM11(54033); DSCR3(10311); |
| | | KIAA0179(23076); POFUT2(23275); TMEM50B(757); CLTCL1(8218); |
| | | FLJ42953(400892); RAB36(9609); C22orf13(83606); FLJ33814(150275); |
| | | NF2(4771); CABP7(164633); RP5-1119A7.4(80020); KIAA1904(114794); |
| | | DNAL4(10126); SYNGR1(9145); TEF(7008); FAM109B(150368); |
| | | TRIOBP(11078); PCTK1(5127); PIM2(11040); SYP(6855); ZXDA(7789); |
| | | RP11-93B10.1(139886); EDA(1896); MLLT7(4303); COL4A6(1288); |
| | | AMMECR1(9949); XPNPEP2(7512); RAP2C(57826); GPC4(2289); |
| | | CD99L2(83692); GDI1(2664); SCML1(6322); |
| hsa-miR-25 | 9; 285; 286; 287; | C1orf188(148646); IQWD1(55827); RASAL2(9462); BTG2(7832); |
| hsa-miR-32 | 288; 289; 290; 291; | DISC1(27185); ZBTB8OS(339487); TMEM53(79639); PIK3R3(8503); |
| | 292; 293; 294; 295; | RSBN1(54665); ANP32E(81611); GATAD2B(57459); MEF2D(4209); |
| | 296; 297; 298; 299; | GREB1(9687); PLGLB2(5342); SLC5A7(60482); ITGAV(3685); |
| | 300; 10; 301; 302; | MYO1B(4430); PIP5K3(200576); RBJ(51277); SUPT7L(9913); |
| | 303; 304; 305; 306; | PLGLB1(5343); AFF3(3899); MGC39518(285172); MARCH4(57574); |
| | 307; 308; 309; 310; | EDEM1(9695); SYN2(6854); BSN(8927); GTF2E1(2960); FNDC3B(64778); |
| | 311; 312; 313; 1293; | DPPA4(55211); MGC21675(92070); CPEB2(132864); PCDH7(5099); |
| | 1294; 1295; 1296; | LOC401137(401137); FLJ20273(54502); G3BP2(9908); |
| | 1297; 1298; 1299; | DKFZp686L1814(132660); CXXC4(80319); SH3D19(152503); |
| | 1300; 1301; 1302; | FBXW7(55294); OSMR(9180); ARSK(153642); LOC90355(90355); |
| | 1303; 1304; 1305; | MAN2A1(4124); DCP2(167227); PCDHB11(56125); PCDHB13(56123); |
| | 1306; 1307; 1308; | LHFPL2(10184); KIAA1961(96459); SOX4(6659); COL19A1(1310); |
| | 1309; 1310; 1311; | LIN28B(389421); TCF21(6943); ARID1B(57492); TULP4(56995); |
| | 1312; 1313; 1314; | TPMT(7172); RAB23(51715); PDE10A(10846); KCTD7(154881); |
| | 1315; 1316; 1317; | CYCS(54205); TMED4(222068); WBSCR18(84277); TSGA14(95681); |
| | 1318; 1319; 1320; | CREB3L2(64764); DLGAP2(9228); TACC1(6867); PI15(51050); |
| | 1321; 1322; 1323; | SLC30A8(169026); KIAA0143(23167); TNFRSF10B(8795); |
| | 1324; 1325; 1326; | RAB11FIP1(80223); NTRK2(4915); RNF38(152006); GNAQ(2776); |
| | 1327; 1328; 1329; | RAB14(51552); ASB6(140459); SEC24C(9632); IFIT2(3433); |
| | 1330; 1331; 1332; | ADRB1(153); VENTX(27287); SFMBT2(57713); SH3PXD2A(9644); |
| | | C10orf118(55088); VAX1(11023); MLSTD2(84188); SLC17A6(57084); |
| | | TMEM16C(63982); HIPK3(10114); RAG1(5896); CD59(966); SES |

TABLE 4-9

| | | |
|---|---|---|
| | | N3(143686); USP28(57646); METTL7A(25840); RBMS2(5939); |
| | | MSRB3(253827); DYRK2(8445); NUDT4(11163); CD69(969); |
| | | STAT2(6773); GNS(2799); TMEM119(338773); SSH1(54434); |
| | | FLJ20674(54621); LOC283487(283487); KIAA0329(9895); |
| | | EIF5(1983); GTF2A1(2957); MOAP1(64112); GOLGA8E(390535); |
| | | MYO5A(4644); C15orf38(348110); PRO0149(29035); MKL(57496); |
| | | SPN(6693); HSPC065(29070); BOLA2(552900); EXOSC6(118460); |
| | | PHLPPL(23035); ATP1B2(482); MAP2K4(6416); MAP2K6(5608); |
| | | KLHL11(65175); TEX2(55852); SUMO2(6613); C18orf19(125228); |
| | | KLHL14(67565); NFIX(4784); ZNF253(56242); FLJ43870(400686); |
| | | AKL(558); PVR(5817); ZNF17(7565); ZNF530(348327); |
| | | MGC35402(399669); SLC12A5(57468); MORC3(23515); AGPAT3(56894); |
| | | RAB36(9609); NF2(4771); APOBEC3F(200316); CACNA11(8911); |
| | | C22orf16(400916); JOSD1(9929); CHST7(56548); RP2(6102); |
| | | PCDH11X(27328); LOC203547(203547); PCYT1B(9468); RNF12(51132); |
| | | LAMP2(3920); PCDH11Y(83259); |
| hsa-miR-26b | 11; 3415; 314; 315; | PNRC2(55629); RHD(6007); PDIK1L(149420); KPNA6(23633); |
| | 316; 317; 318; 319; | S100A7L1(338324); UHMK1(127938); UCK2(7371); CEP350(9857); |
| | 320; 321; 322; 323; | PFKFB2(5208); RHOU(58480); FBXO42(54455); ATPAF1(64756); |
| | 324; 325; 326; 327; | C1orf22(80267); USH2A(7399); TTC13(79573); EXOC8(149371); |
| | 328; 329; 330; 331; | NID1(4811); SELI(85465); RHOQ(23433); SOCS5(9655); ZAK(51776); |
| | 332; 333; 334; 335; | NAB1(4664); PLCL1(5334); ALS2CR2(55437); FAM98A(25940); |
| | 1333; 1334; | GFPT1(2673); FLJ14668(84908); MGAT4A(11320); FLJ10996(54520); |
| | | MAP3K2(10746); WDR33(55339); CACNB4(785); ACVR1C(130399); |
| | | USP37(57695); CUL3(8452); RBM15B(29890); DZIP3(9666); |
| | | PARP14(54625); MME(4311); B3GNT5(84002); THRB(7068); |
| | | CLASP2(23122); LRRC2(79442); CAST1(26059); VGLL3(389136); |
| | | ZBTB11(27107); TMEM39A(55254); AADACL1(57552); PI4K2B(55300); |
| | | PGM2(55276); HIP2(3093); RUFY3(22902); MOBKL1A(92597); |
| | | ENPEP(2028); NARG1(80155); USP38(84640); SMAD1(4086); |
| | | PALLD(23022); GABRG1(2565); GABRA4(2557); EPHA5(2044); |
| | | NAP1L5(266812); CXXC4(80319); BBS7(55212); SLC7A11(23657); |
| | | MAP1B(4131); TNPO1(3842); POLR3G(10622); ARHGAP26(23092); |
| | | LSM11(134353); LOC153222(153222); TRIM52(84851); |
| | | C6orf151(154007); FAM8A1(51439); COL19A1(1310); PNRC1(10957); |
| | | NT5DC1(221294); C6orf68(116150); C6orf85(63027); SRPK1(6732); |
| | | ASCC3(10973); TSPYL4(23270); KIAA0408(9729); ZNF92(168374); |
| | | PHTF2(57157); ZNF655(79027); DGKB(1607); CDK6(1021); |
| | | DOCK4(9732); TNKS(8658); BAG4(9530); DDHD2(23259); MTDH(92140); |
| | | MFHAS1(9258); GSR(2936); WDR21C(138009); MLANA(2315); |
| | | LOC441426(441426); TJP2(9414); NTRK2(4915); C9orf47(286223); |
| | | FCMD(2218); RALGPS1(9649); LRRC19(64922); SEMA4D(10507); |
| | | ROD1(9991); FBXW2(26190); HSPA14(51182); PTER(9 |

TABLE 4-10

| | | |
|---|---|---|
| | | 317); RAB18(22931); REEP3(221035); PTEN(5728); |
| | | TMEM20(159371); KIAA1600(57700); SLC25A16(8034); |
| | | SAR1A(56681); DLG5(9231); EIF3S10(8661); PHCA(55331); |
| | | FUT4(2526); ATM(472); DLAT(1737); PAFAH1B2(5049); |
| | | EIF4G2(1982); FLJ36874(219988); RAB30(27314); |
| | | CHORDC1(26973); SLC36A4(120103); KIAA1467(57613); |
| | | ETNK1(55500); KLHDC5(57542); THAP2(83591); C12orf23(90488); |
| | | ULK1(8408); FLJ10292(55110); WBP11(51729); SLC2A13(114134); |
| | | SLC38A2(54407); PTPRB(5787); CDK8(1024); RFC3(5983); |
| | | LNX2(222484); C14orf24(283635); PEL12(57161); PLEKHH1(57475); |
| | | KIAA1737(85457); CPSF2(53981); PPP2R5C(5527); EIF5(1983); |
| | | C14orf126(112487); KIAA0317(9870); SPTLC2(9517); |
| | | GTF2A1(2957); RTF1(23168); RCN2(5955); NIPA1(123606); |
| | | GABRB3(2562); ZFP106(64397); UBR1(197131); ARPP-19(10776); |
| | | PRTG(283659); MKL2(57496); NDE1(54820); SRCAP(10847); |
| | | FBXL19(54620); GRIN2A(2903); N4BP1(9683); Pfs2(51659); |
| | | FANCA(2175); CTNS(1497); UBE2G1(7326); ULK2(9706); DDX52(11056); |
| | | LOC641522(641522); GNA13(10672); HELZ(9931); MXRA7(439921); |
| | | RNMT(8731); SMAD4(4089); ENOSF1(55556); SERPINB3(6317); |
| | | LOC390980(390980); ZNF708(7562); C20orf121(79183); DIDO1(11083); |
| | | CXADR(1525); JAM2(58494); SLC5A3(6526); BRWD1(54014); |
| | | TNRC6B(23112); ZBED4(9889); MGC70863(284942); CXorf15(55787); |
| | | NHS(4810); PGK1(5230); WNK3(65267); POF1B(79983); AMOT(154796); |
| | | ATP11C(286410); |
| hsa-miR-30a-3p | 12; 3416; 3418; 336; | EIF2C3(192669); PRKAA2(5563); CDC14A(8556); VANGL1(81839); |
| | 337; 338; 339; 340; | CACYBP(27101); FAM20B(9917); CEP350(9857); MTHFR(4524); |
| | 341; 342; 343; 344; | C1orf181(54680); PRKAB2(5565); ENSA(2029); LPGAT1(9926); |
| | 345; 346; 1335; 1336; | LIN9(286826); TAF5L(27097); TOMM20(9804); AKT3(10000); |
| | | CCNT2(905); BMPR2(659); CREB1(1385); ROCK2(9475); GFPT1(2673); |
| | | TGFA(7039); SESTD1(91404); RAPH1(65059); CRTAP(10491); |
| | | LPP(4026); SEC22L3(9117); MINA(84864); WHSC1(7468); FGF2(2247); |
| | | RASSF6(166824); DNAJB14(79982); RNF150(57484); MCCC2(64087); |
| | | ANKH(56172); ST8SIA4(7903); LRRTM2(26045); PANK3(79646); |
| | | IRF4(3662); NFYA(4800); PHACTR2(9749); SYNJ2(8871); |
| | | UBE2J1(51465); DJ12208.2(57226); LOC441257(441257); |
| | | ZKSCAN1(7586); EIF2AK1(27102); SEMA3C(10512); SEMASE(9723); |
| | | TPK1(27010); WHSC1L1(54904); ARMC1(55156); PAG1(55824); |
| | | FLJ45537(401535); PSIP1(11168); KGFLP2(654466); CDC14B(8555); |
| | | PCGF5(84333); CCDC6(8030); PIK3AP1(118788); C10orf118(55088); |
| | | GPIAP1(4076); SUV420H1(51111); HBXAP(51773); KDELC2(143888); |
| | | ETNK1(55500); RIC8B(55188); KIAA0152(9761); FLJ46363(400002); |
| | | KRAS(3845); SLC38A1(81539); MAP3K12(7786); PHLDA1(22822); |
| | | IGF1(3479); PCDH17(27253); FLJ25477(219287); FLT1(2321); |
| | | POU4F1(5457); GNPNAT1(64841); FGF7(2252) |

TABLE 4-11

| | | |
|---|---|---|
| | | ; Gcom1(145781); ANKDD1A(348094); FBXO22(26263); ABHD2(11057); |
| | | KIAA1794(55215); GOLGA8B(440270); MKL2(57496); SMG1(23049); |
| | | IGSF6(10261); MAF(4094); ZCCHC14(23174); MLLT6(4302); |
| | | ANKFY1(51479); UBE2G1(7326); NUFIP2(57532); SSH2(85464); |
| | | BRCA1(672); FAM104A(84923); RAB31(11031); DOK6(220164); |
| | | DSC3(1825); RNF24(11237); SLC5A3(6526); BRWD1(54014); |
| | | TNRC6B(23112); HS6ST2(90161); DAZ2(57055); DAZ4(57135); |
| | | DAZ3(57054); |
| hsa-miR-34a | 13; 347; 348; 3419; | VWA1(64856); H6PD(9563); PLA2G2F(64600); HCN3(57657); |
| hsa-miR-449 | 349; 350; 351; 352; | NAV1(89796); C1orf183(55924); KCNK3(3777); SEMA4F(10505); |
| hsa-miR-449b | 353; 354; 355; 356; | ASB1(51665); DLEC1(9940); CLDN18(51208); CMYA1(165904); |
| | 357; 358; 359; 360; | UCN2(90226); RAB43(339122); SLCO2A1(6578); LETM1(3954); |
| | 361; 362; 363; 364; | MXD4(10608); KIAA1909(153478); NDST1(3340); CPLX2(10814); |
| | 365; 366; 367; 368; | TPPP(11076); DLL1(28514); MGC5242(78996); KIAA0773(9715); |
| | 369; 370; 371; 14; | C8orf13(83648); C9orf47(286223); FGD3(89846); SEMA4D(10507); |
| | 372; 380; 373; 374; | FAM26C(255022); TSPAN18(90139); DUSP8(1850); FOSL1(8061); |
| | 375; 381; 376; 377; | PCSK7(9159); FMNL3(91010); VPS37B(79720); THSD4(79875); |
| | 378; 379; 15; 1337; | FLJ22795(80154); AP3S2(10239); FLJ36208(283948); RAB40C(57799); |
| | 1338; | CCL22(6367); VPS4A(27183); AFG3L1(172); GASB(2622); |
| | | XYLT1(64131); C16orf58(64755); RUTBC1(9905); TNFSF12(8742); |
| | | SARM1(23098); STARD3(10948); PRKCA(5578); VAMP2(6844); |
| | | FLOT2(2319); MPP2(4355); KIAA0427(9811); DSC3(1825); |
| | | FZR1(51343); SAMD4B(55095); FLJ45684(400666); LOC284296(284296); |
| | | STK35(140901); SRC(6714); ProSAPiP1(9762); PDXK(8566); |
| | | TNRC6B(23112); SEPT3(55964); IL2RB(3560); TOB2(10766); |
| | | POLR3H(171568); |
| hsa-miR-107 | 16; 382; 383; 384; | KIF1B(23095); MFN2(9927); EIF2C4(192670); DNAJB4(11080); |
| | 385; 386; 387; 388; | NHLH1(4807); UHMK1(127933); RASAL2(9462); BTG2(7832); |
| | 389; 390; 391; 392; | MTHFR(4524); RIMS3(9783); SLC35D1(23169); AMIGO1(57463); |
| | 393; 394; 395; 396; | SYT6(148281); PRKAB2(5565); RNASEL(6041); RAB10(10890); |
| | 397; 398; 399; 1339; | FOSL2(2355); GALM(130589); CEP68(23177); ARID5A(10865); |
| | 1340; 1341; 1342; | GCC2(9648); RGPD5(84220); PTPN4(5775); SCN2A2(6326); NRP2(8828); |
| | 1343; 1344; 1345; | RPE(6120); C2orf17(79137); HRB(3267); MCFD2(90411); |
| | 1346; 1347; 1348; | LMAN2L(81562); TFCP2L1(29842); SCN1A(6323); PRKAG3(53632); |
| | 1349; 1350; 1351; | NKTR(4820); SNRK(54861); ARIH2(10425); RBM15B(29890); |
| | 1352; 1353; 1354; | EPHA3(2042); ADPRH(141); MME(4311); PRKCI(5584); NEK10(152110); |
| | 1355; 1356; 1357; | UCN2(90226); CAMKV(79012); FOXP1(27086); RYBP(23429); |
| | 1358; | CNTN3(5067); DCBLD2(131566); CD80(941); LRRC15(131578); |
| | | FGFRL1(53834); WHSC1(7468); DKFZP564O0823(25849); CCNG2(901); |
| | | FGF2(2247); CLCN3(1182); CLOCK(9575); ASAHL(27163); |
| | | OTUD4(54726); CASP3(836); PDLIM4(8572); SLC36A1(206358); |
| | | G3BP(10146); UBXD8(23197); UNG2(10309); AFF4(27125);CDC23(8697); |
| | | RBM24(221662); BTN1A1(696); FLJ45422(441140); AI |

TABLE 4-12

| | | |
|---|---|---|
| | | M1(202); ZDHC14(79683); C6orf125(84300); IHPK3(117283); |
| | | BACH2(60468); ZNRF2(223082); ADCY1(107); EGFR(1956); |
| | | PURB(5814); FLJ45974(401337); ECOP(81552); CACNA2D1(781); |
| | | ZNF705CP(389631); RHOBTB2(23221); LONRF1(91694); ARMC1(55156); |
| | | TPD52(7163); ZHX1(11244); ST3GAL1(6482); IL11RA(3590); |
| | | MGC21881(389741); NTRK2(4915); C9orf47(286223); |
| | | PALM2-AKAP2(445815); MRPS2(51116); SMU1(55234); RNF38(152006); |
| | | TRIM14(9830); RAPGEF1(2889); RASSF4(83937); PTEN(5728); |
| | | UPF2(26019); NUDT5(11164); HERC4(26091); CPEB3(22849); |
| | | C10orf84(63877); SMPD1(6609); TMEM16C(63982); ZFP91(80829); |
| | | POLD3(10714); PHCA(55331); UBE4A(9354); C11orf55(399879); |
| | | PCSK7(9159); FLJ20489(55652); ZNFN1A4(64375); OS9(10956); |
| | | DYRK2(8445); GLIPR1(11010); FLJ90579(283310); TMED2(10959); |
| | | TMEM132B(114795); RAD52(5893); FKBP11(51303); BAZ2A(11176); |
| | | LIN7A(8825); NUAK1(9891); CHFR(55743); ZNF198(7750); |
| | | AKAP11(11215); ITGBL1(9358); ARHGEF7(8874); GPR12(2835); |
| | | RNF31(55072); C14orf101(54916); KIAA0247(9766); C14orf129(51527); |
| | | KIAAAA0329(9895); EIF5(1983); TM9SF1(10548); EXOC5(10640); |
| | | SIX4(51804); RDH11(51109); MAP3K9(4293); KIAA0317(9870); |
| | | THSD3(145501); DICER1(23405); C14orf139(79686); SORD(6652); |
| | | IL16(3603); TTBK2(146057); GRAMD2(196996); C16orf34(90861); |
| | | FLJ14154(79903); DREV1(51108); PDPR(55066); KIAA0513(9764); |
| | | N4BP1(9683); LOC283849(283849); PCOLN3(5119); GARNL4(23108); |
| | | NDEL1(81565); NF1(4763); THRA(7067); ABCC3(8714); AKAP1(8165); |
| | | DYNLL2(140735); BAIAP2(10458); C17orf76(388341); GFAP(2670); |
| | | LYK5(92335); AXIN2(8313); HELZ(9931); C17orf62(79415); |
| | | RNMT(8731); RNF165(494470); DLGAP1(9229); GATAD2A(54815); |
| | | HKR2(342945); FLJ45684(400666); TCF8(6929); CRSP7(9441); |
| | | CAPN12(147968); PHF20(51230); TGIF2(60436); SLC9A8(23315); |
| | | C20orf11(54994); DNAJC5(80331); C20orf17(140710); |
| | | IFNAR1(3454); ITSN1(6453); SYNJ1(8867); DSCR3(10311); |
| | | BRWD1(54014); LOC284861(284861); TNRC6B(23112); CECR1(51816); |
| | | DGCR14(8220); PPM1F(9647); TOB2(10766); C22orf9(23313); |
| | | STS(412); EDA(1896); OGT(8473); CXorf6(10046); RPS6KA3(6197); |
| | | TMEM47(83604); AMMECR1(9949); AMOT(154796); SEPT6(23157); |
| hsa-miR-140 | 17; 400; 401; | KIF1B(23095); PRPF38A(84950); IFI44L(10964); BCL9(607); |
| | 402; 403; | FCGR2A(2212); RALGPS2(55103); C1orf21(81563); CAMSAP1L1(23271); |
| | | RCOR3(55758); ATF3(467); PROX1(5629); DISC1(27185); TTMB(399474); |
| | | WDR57(9410); HIVEP3(59269); C1orf163(65260); SYT6(148281); |
| | | ETV3(2117); ABL2(27); SYT2(127833); YOD1(55432); FAM89A(375061); |
| | | AKT3(10000); SOX11(6664); PPP1CB(5500); STON1(11037); |
| | | ANKRD36(375248); STEAP3(55240); CENTG2(1 |

TABLE 4-13

| | | 16987); BCL11A(53335); MOBK1B(55233); MGC11332(84804); |
|---|---|---|
| | | ORC4L(5000); HRH1(3269); NKTR(4820); ZNF654(55279); |
| | | TP73L(8626); IL1RAP(3556); VGLL4(9686); RAFTLIN(23180); |
| | | CMTM6(54918); LRRC2(79442); PCYT1A(5130); MGC21675(92070); |
| | | DCUN1D4(23142); SLC4A4(8671); HERC6(55008); ANK2(287); |
| | | WDR17(116966); PPARGC1A(10891); CENTD1(116984); ATP8A1(10396); |
| | | WDFY3(23001); TSPAN5(10098); FAM105B(90268); R7BP(401190); |
| | | BIRC1(4671); GCNT4(51301); LHFPL2(10184); MGC23909(153339); |
| | | NR3C1(2908); KIAA0676(23061); SOX4(6659); VEGF(7422); |
| | | MYO6(4646); SASH1(23328); UST(10090); TULP4(56995); |
| | | STX7(8417); PDCD2(5134); KCTD7(154881); CALU(813); CYCS(54205); |
| | | SCRN1(9805); BAZ1B(9031); HGF(3082); PODXL(5420); DGKI(9162); |
| | | FLJ12700(79970); DLGAP2(9228); ZNF705CP(389631); DDHD2(23259); |
| | | POLR2K(5440); PHF20L1(51105); C8orf30A(51236); |
| | | WHSC1L1(54904); ARMC1(55156); TMEM74(157753); C8orf54(439941); |
| | | ST3GAL1(6482); TYRP1(7306); MGC21881(389741); VPS13A(23230); |
| | | C9orf47(286223); PALM2(114299); GPR107(57720); KLF9(687); |
| | | KIAA0367(23273); RAB14(51552); MGC16291(84856); |
| | | C10orf6(55719); INA(9118); SYT15(83849); PLEKHK1(219790); |
| | | BNIP3(664); TUB(7275); IPO7(10527); TAGLN(6876); MRPL17(63875); |
| | | CTSC(1075); METTL7B(196410); DKFZP586D0919(25895); |
| | | NAV3(89795); FLJ21963(79611); C12orf34(84915); OAS3(4940); |
| | | TMEM132B(114795); BCAT1(586); SLC38A2(54407); BAZ2A(11176); |
| | | LIN7A(8825); KITLG(4254); PPP1CC(5501); TBX5(6910); |
| | | NOS1(4842); KLF12(11278); KCTD12(115207); ABCC4(10257); |
| | | PELI2(57161); TITF1(7080); GCH1(2643); GTF2A1(2957); |
| | | SEL1L(6400); C15orf41(84529); ARIH1(25820); C15orf26(161502); |
| | | CALML4(91860); GNPTG(84572); AYTL1(54947); NUTF2(10204); |
| | | FAM100A(124402); PPL(5493); XYLT1(64131); MIR16(51573); |
| | | RBM35B(80004); SRR(63826); MLX(6945); PNPO(55163); |
| | | IGF2BP1(10642); PRKCA(5578); SSTR2(6752); TRPV3(162514); |
| | | SSH2(85464); PIP5K2B(8396); PPARBP(5469); MMD(23531); |
| | | GNAL(2774); RNMT(8731); DTNA(1837); ZNF271(10778); RAB27B(5874); |
| | | TNFRSF11A(8792); ANKRD29(147463); MBP(4155); ZNF317(57693); |
| | | ZFP28(140612); MOBKL2A(126308); MGC71805(403113); ZNF490(57474); |
| | | GYS1(2997); ZNF432(9668); C20orf129(81610); NCOA3(8202); |
| | | STX16(8675); CDH26(60437); ZHX3(23051); UBE2V1(7335); |
| | | C20orf45(51012); PDXK(8566); STCH(6782); TSSK2(23617); |
| | | PPIL2(23759); TNRC6B(23112); PPARA(5465); ZBED4(9889); |
| | | MSL3L1(10943); CNKSR2(22866); OGT(8473); AKAP14(158798); |
| | | PCYT1B(9468); RNF12(51132); COVA1(10495); MCF2(4168); |
| | | PCDH11Y(83259); |
| hsa-miR-148b | 18; 3420; 404; 3421; | ATAD3C(219293); PRDM16(63976); CLCN6(1185); C1orf144(26099); |
| | 405; 406; 407; 408; | PNRC2(55629); RHD(6007); EIF2C4(192670); EIF2C1(26523) |
| | 409; 410; 411; 412; | |
| | 413; 414; 4 | |

TABLE 4-14

| | |
|---|---|
| 15; 416; 417; 1359; | ; MIER1(57708); EDG1(1901); CSF1(1435); S100A7L1(338324); |
| 1360; 1361; 1362; | KIAA0446(9673); DNM3(26052); FBXO28(23219); C1orf95(375057); |
| 1363; 1364; 1365; | DISC1(27185); RHCE(6006); AK2(204); MTF1(4520); SLC6A9(6536); |
| 1366; 1367; 1368; | EPS15(2060); SERBP1(26135); USP33(23032); TMED5(50999); |
| | WDR47(22911); NME7(29922); NUCKS1(64710); ANGEL2(90806); |
| | TMEM63A(9725); GREM2(64388); MXD1(4084); FLJ13910(64795); |
| | EPB41L5(57669); GPR17(2840); UGCGL1(56886); PTPN18(26469); |
| | PLEKHB2(55041); LASS6(253782); ADAM23(8745); C2orf17(79137); |
| | MLPH(79083); RTN4(57142); CYP26B1(56603); MOBK1B(55233); |
| | TGOLN2(10618); MGAT4A(11320); USP37(57695); EPHA4(2043); |
| | HES6(55502); FLJ22671(79919); ARL8B(55207); ITGA9(3680); |
| | LIMD1(8994); MITF(4286); C3orf37(56941); ATP11B(23200); |
| | MAGI1(9223); ROBO1(6091); MINA(84864); OSBPL11(114885); |
| | TRIM59(286827); SLITRK3(22865); LOC285382(285382); |
| | GP5(2814); C3orf21(152002); WHSC1(7468); D4S234E(27065); |
| | KLHL5(51088); MOBKL1A(92597); ARHGAP10(79658); CLCN3(1182); |
| | FAM53A(152877); LRPAP1(4043); STX18(53407); DKFZp761B107(91050); |
| | ATP8A1(10396); SGCB(6443); MLF1IP(79682); AHRR(57491); |
| | CAST(831); LOC90355(90355); LOC91137(91137); DCP2(167227); |
| | FLJ37562(134553); SMAD5(4090); KCTD16(57528); MYOZ3(91977); |
| | CPEB4(80315); NSD1(64324); N4BP3(23138); TPPP(11076); |
| | PDE4D(5144); MRPS27(23107); HOMER1(9456); LYSMD3(116068); |
| | TMED7(51014); MARCH3(115123); SAR1B(51128); DNAJC18(202052); |
| | QKI(9444); PPP1R10(5514); HLA-DQB2(3120); NUDT3(11165); |
| | CDC2L6(23097); STX7(8417); PIP3-E(26034); ITGB8(3696); |
| | ADAM22(53616); ASB4(51666); SLC26A4(5172); MEOX2(4223); |
| | POLM(27434); STEAP4(79689); RABL5(64792); TFEC(22797); |
| | WASL(8976); MGC5242(78996); LMBR1(64327); MTMR9(66036); |
| | KIAA1456(57604); VPS37A(137492); SCARA3(51435); |
| | LEPROTL1(23484); IKBKB(3551); ASPH(444); DENND4C(55667); |
| | C9orf47(286223); FAM73B(84895); KIAA1815(79956); TRIM14(9830); |
| | ASB6(140459); ZNF37A(7587); PTEN(5728); C10orf28(27291); |
| | KLF6(1316); RP11-142I17.1(26095); SH3PXD2A(9644); CCKBR(887); |
| | TEAD1(7003); ZCSL3(120526); RTN3(10313); PANX1(24145); |
| | FUT4(2526); MLL(4297); STS-1(84959); TH(7054); TRPM5(29850); |
| | VPS37C(55048); SESN3(143686); PPP2R1B(5519); DDX6(1656); |
| | EMP1(2012); GOLT1B(51026); WNT1(7471); RBMS2(5939); |
| | GLIPR1(11010); OAS2(4939); KIAA1853(84530); SFRS2IP(9169); |
| | ITGA5(3678); GNS(2799); CPM(1368); IGF1(3479); NT5DC3(51559); |
| | RBM19(9904); FLJ20674(54621); ATP11A(23250); FLT1(2321); |
| | TUBGCP3(10426); MPP5(64398); SLC39A9(55334); FLJ11806(79882); |
| | GLRX5(51218); TRAF3(7187); CFL2(1073); FBXO33(254170); |
| | KIAA0831(22863); ZFYVE26(23503); RPS6KA5(9252); CHRNA |

TABLE 4-15

| | | 7(1139); RAD51(5888); AP4E1(23431); PTPLAD1(51495); |
|---|---|---|
| | | INOC1(54617); NPTN(27020); C16orf9(83986); SNN(8303); |
| | | PRRT2(112476); ADCY7(113); GNAO1(2775); MMP15(4324); |
| | | NFAT5(10725); RPL13(6137); LUC7L(55692); PKD1(5310); |
| | | USP31(57478); FTS(64400); ZDHHC7(55625); KSR1(8844); |
| | | RAB11FIP4(84440); CDK5R1(8851); SOCS7(30837); ABCC3(8714); |
| | | MSI2(124540); WDR68(10238); TOM1L2(146691); FLOT2(2319); |
| | | PSCD1(9267); NPTX1(4884); SIRT7(51547); CSNK1D(1453); |
| | | C18orf25(147339); RNF152(220441); LOC400657(400657); |
| | | ZADH2(284273); P2RY11(5032); ILF3(3609); LDLR(3949); |
| | | CRTC1(23373); ZNF175(7728); FLJ46385(390963); LOC390980(390980); |
| | | ZNF709(163051); ZNF614(80110); EPB41L1(2036); TGIF2(60436); |
| | | RTEL1(51750); DNAJC5(80331); MAFB(9935); RIMS4(140730); |
| | | ACOT8(10005); B4GALT5(9334); AGPAT3(56894); SYNJ1(8867); |
| | | PSCD4(27128); TNRC6B(23112); DGCR2(9993); PPM1F(9647); |
| | | MGC17330(113791); NPTXR(23467); MKL1(57591); ATP6AP2(10159); |
| | | RP13-360B22.2(84187); CXorf45(79868); RP11-308D16.4(441522); |
| | | ATP2B3(492); PIGA(5277); CXorf23(256643); RAB9B(51209); |
| hsa-miR-190 | 19; 418; 3422; | C1orf123(54987); SUSD4(55061); DDEF2(8853); KIAA1841(84542); |
| | 419; 420; 421; | BCL11A(53335); GFPT1(2673); ST6GAL2(84620); SLC25A12(8604); |
| | 422; 423; 424; | NEUROD1(4760); PAX3(5077); RAP2B(5912); KIAA2018(205717); |
| | 425; 426; 427; | XRN1(54464); SRD5A2L(79644); MOBKL1A(92597); MGC26963(166929); |
| | 428; 429; 430; | EPHA5(2044); WDFY3(23001); OTUD4(54726); LOC90826(90826); |
| | 1369; | F2R(2149); FLJ30596(133686); LOC153364(153364); TRIM36(55521); |
| | | SPOCK1(6695); IBRDC2(255488); ZNF192(7745); SERPINB9(5272); |
| | | PHIP(55023); BACH2(60468); CACNA2D1(781); KIAA0143(23167); |
| | | PHF20L1(51105); FBXO32(114907); C9orf42(116224); |
| | | OPRS1(10280); C10orf72(196740); COX15(1355); FLJ10726(55216); |
| | | ARHGEF12(23365); GRM5(2915); STK38L(23012); BCAT1(586); |
| | | SFR92IP(9169); CAPS2(84698); ARL11(115761); KIAA1008(22894); |
| | | SLITRK1(114798); ATXN3(4287); IREB2(3658); MYEF2(50804); |
| | | MYO5A(4644); WDR72(256764); SUHW4(54816); GRIN2A(2903); |
| | | BOLA2(552900); EIF1(10209); C18orf1(753); MALT1(10892); |
| | | SMAD2(4087); HKR2(342945); ZNF229(7772); SYNJ1(8867); |
| | | ERG(2078); BRWD1(54014); AP1S2(8905); RPS6KA3(6197); |
| | | ZMAT1(84460); RP6-166C19.1(255313); PRKY(5616); |
| hsa-miR-199a | 20; 3423; 3424; | H6PD(9563); PDPN(10630); C1orf33(127428); LRRC8C(84230); |
| hsa-miR-199b | 3425; 431; 432; | FDPS(2224); C1orf21(81563); PCTK3(5129); C1orf107(27042); |
| | 433; 426; 434; | ATF3(467); C1orf95(375057); DISC1(27185); RERE(473); |
| | 435; 436; 437; | CLSTN1(22883); ECE1(1889); KIAA0319L(79932); PIK4CB(5298); |
| | 438; 443; 427; | GON4L(54856); GPATC4(54865); CD5L(922); CRP(1401); RGS16(6004); |
| | 439; 444; 3428; | EXOC8(149371); CAD(790); SLC3A1(6519); BCL2L11(10018); |
| | 445; 440; 441; | GPR39(2863); GPD2(2820); KLHL23(151230); ABI2(10152); |
| | 442; 21; | ALPP(250); RB |

TABLE 4-16
J(51277); TSPYL6(388951); TGFA(7039);
LOC388969(388969); WDR33(55339);
FLJ23861(151050); IGFBP5(3488); LIMD1(8994);
SLC38A3(10991); SPATA12(353324); SMC4L1(10051);
SRGAP3(9901); COLQ(8292); PLXNB1(5364);
PFKFB4(5210); NICN1(84276); PLXND1(23129);
LEPREL1(55214); PPP1R2(5504); WHSC1(7468);
HERC6(55008); MGC26963(166929);
FLJ20273(54502); PCDH18(54510); JMJD1B(51780);
NDST1(3340); SGCD(6444); FCHSD1(89848);
LMAN2(10960); FLT4(2324); BTN2A2(10385);
ZNF192(7745); DDR1(780); COL19A1(1310);
TCF21(6943); PEX3(8504); PGM3(5238);
TXLNB(167838); FOXK1(221937); WBSCR1(7458);
LRRC61(65999); RBM33(155435); TRIAD3(54476);
CDCA7L(55536); DKFZP434B0335(25851);
PODXL(5420); ZNF705CP(389631); EXTL3(2137);
RBPMS(11030); FUT10(84750); RUNX1T1(862);
CREB3(10488); KCNT1(57582); PTPLAD2(401494);
C9orf100(84904); CDC14B(8555); BAAT(570);
FAM78A(286336); NELF(26012); ZNF37A(7587);
BTRC(8945); NUDT5(11164); MARCH8(220972);
C10orf54(64115); COX15(1355); SH3PXD2A(9644);
C10orf46(143384); C11orf46(120534);
GPIAP1(4076); LDLRAD3(143458); C11orf9(745);
FLJ13848(79829); SYT12(91683); SNF1LK2(23235);
SORL1(6653); LIN7C(55327); PRPF19(27339);
MAP3K11(4296); DHCR7(1717); LOC283219(283219);
RAB30(27314); FZD4(8322); SLC35F2(54733);
SMARCD1(6602); LARP4(113251); NAB2(4665);
TMEM132B(114795); M6PR(4074); BTG1(694);
KL(9365); ARF6(382); FNTB(2342);
SLC24A4(123041); TCL6(27004); ATXN3(4287);
BTBD7(55727); 76P(27229); SNX1(6642);
ZNF609(23060); TTBK2(146057); FLJ22795(80154);
RGMA(56963); IL4R(3566); FLJ31875(197320);
CLCN7(1186); MGC2474(65988); BRD7(29117),
FLJ10815(55238); AP1G1(164); KIAA0523(23302);
BIRC4BP(54739); TNK1(8711); ARHGEF15(22899);
TNFAIP1(7126); GOSR1(9527); ATP6V0A1(535);
RND2(8153); MAPT(4137); SP2(6668); PNPO(55163);
NFE2L1(4779); AKAP1(8165); CLTC(1213);
PRKCA(5578); SSTR2(6752); C17orf63(55731);
EZH1(2145); TMC6(11322); SGSH(6448);
ZCCHC2(54877); BCL2(596); MBP(4155);
LOC401898(401898); ZNF440(126070); ZNF439(90594);
ZNF700(90592); ZNF440L(284390); ZNF226(7769);
BCAM(4059); PVRL2(5819); CRX(1406);
PPP2R1A(5518); ZNF547(284306); ZNF17(7565);
ZNF419(79744); FLJ38288(284309); ZNF586(54807);
RANBP3(8498); SLC25A23(79085); ZNF44(51710);
ZNF563(147837); MGC71805(403113);
FLJ23447(79883); HAPLN4(404037);
FLJ37549(163115); RASGRP4(115727);
ZNF468(90333); ZNF702(79986);
LOC284296(284296); SLC24A3(57419);
EPB41L1(2036); SLC23A2(9962); GGTL3(2686);
SAMHD1(25939); ZHX3(23051); PTGIS(5740);
ATP9A(10079); GATA5(140628); BTBD4(140685);
SLC5A3(6526);AGPAT3(56894);T

TABLE 4-17

| | | |
|---|---|---|
| | | SSK2(23617); SEPT5(5413); COMT(1312); FLJ21125(79680); |
| | | PPM1F(9647); CELSR1(9620); MLC1(23209); SBF1(6305); |
| | | JM11(90060); OCRL(4952); TAB3(257397); SLC35A2(7355); |
| | | ZDHHC9(51114); CXorf2(1527); XX-FW81657B9.4(8270); |
| hsa-miR-202* | 22; 446; 447; | CMPK(51727); LEPROT(54741); LEPR(3953); RNBP1L(54874); |
| | | NTNG1(22854); SLC22A15(55356); FAM46C(54855); DDR2(4921); |
| | | PAPPA2(60676); ATP2B4(493); RPS6KC1(26750); PROX1(5629); |
| | | FBXO28(23219); C1orf95(375057); C1orf136(400574); |
| | | FABP3(2170); AK2(204); PPT1(5538); TMED5(50999); ENSA(2029); |
| | | RAB3GAP2(25782); LBR(3930); ENAH(55740); CHML(1122); |
| | | PPP1CB(5500); SLC5A7(60482); POLR1B(84172); EPC2(26122); |
| | | SLC39A10(57181); CD28(940); RPE(6120); ACSL3(2181); |
| | | RNASEH1(246243); MGAT4A(11320); CACNB4(785); FJL13984); |
| | | KIAA1715(80856); CERKL(375298); PGAP1(80055); TRAK2(66008); |
| | | ERBB4(2066); EAF1(85403); TGFBR2(7048); CRTAP(10491); |
| | | LIMD1(8994); PTPRG(5793); ALCAM(214); NAALADL2(254827); |
| | | PIK3CA(5290); USP13(8975); SUMF1(285362); OXTR(5021); |
| | | SATB1(6304); TMF1(7110); EIF4E3(317649); MINA(84864); |
| | | MGC40579(256356); HIP2(3093); RUFY3(22902); MOBKL1A(92597); |
| | | DKFZP564O0823(25849); FRAS1(80144); CDS1(1040); |
| | | ARHGAP24(83478); NPNT(255743); NARG1(80155); STOX2(56977); |
| | | USP46(64854); GRSF1(2926); DNAJB14(79982); SETD7(80854); |
| | | LOC201725(201725); MLF1IP(79682); FLJ11193(55322); |
| | | DNAJA5(134218); SERF1A(8293); FLJ37562(134553); NDFIP1(80762); |
| | | G3BP(10146); PRLR(5618); ARSB(411); MGC23909(153339); |
| | | TRIM36(55521); TMED7(51014); NUDCD2(134492); BTN3A1(11119); |
| | | FLJ45422(441140); C6orf49(29964); LRRC1(55227); RWDD2(112611); |
| | | LIN28B(389421); C6orf68(116150); TBPL1(9519); C6orf55(51534); |
| | | PHACTR2(9749); ATXN1(6310); SYNCRIP(10492); STX7(8417); |
| | | PIP3-E(26034); PDE10A(10846); TMEM106B(54664); CALU(813); |
| | | ZNF12(7559); DRCTNNB1A(84668); JAZF1(221895); CPVL(54504); |
| | | ECOP(81552); SEMA3D(223117); FLJ36031(168455); PPP1R3A(5506); |
| | | TFEC(22797); TSPAN12(23554); CNOT4(4850); VPS37A(137492); |
| | | PROSC(11212); BAG4(9530); UBE2V2(7336); GDAP1(54332); |
| | | WISP1(8840); TRIM35(23087); OPRK1(4986); IMPAD1(54928); |
| | | CA8(767); ZNF704(619279); PAG1(55824); RUNXIT1(862); |
| | | TRPS1(7227); DDEF1(50807); ANKRD20A3(441425); NTRK2(4915); |
| | | TGFBR1(7046); PALM2-AKAP2(445815); LRRC19(64922); |
| | | WDR40A(25853); BICD2(23299); ZNF510(22869); PPP3R2(5535); |
| | | FBXW2(26190); RBM18(92400); ARL5B(221079); ZNF37A(7587); |
| | | OPN4(94233); PCGF5(84333); PI4KII(55361); ENTPD7(57089); |
| | | SCD(6319); ADRB1(153); ZNF11B(7558); SAR1A(56681); |
| | | KCNMA1(3778); SORCS1(114815); ABLIM1(3983); PDZD8(118987); |
| | | MLSTD2(84188); CTNND1(150 |

TABLE 4-18

| | | |
|---|---|---|
| | | 0); AMOTL1(154810); MLL(4297); SORL1(6653); SOX6(55553); |
| | | CD59(966); FADS1(3992); SUV420H1(51111); FLJ42258(440049); |
| | | SLC36A4(120103); SESN3(143686); FAM76B(143684); |
| | | FLJ20010(54494); DDX6(1656); ATF7IP(55729); PDE3A(5139); |
| | | FGFR1OP2(26127); LRRK2(120892); THAP2(83591); RAB21(23011); |
| | | NTS(4922); PSMD9(5715); NRIP2(83714); CLEC7A(64581); |
| | | LMO3(55885); KRAS(3845); ITPR2(3709); ADCY6(112); CSAD(51380); |
| | | CBX5(23468); LRRC10(376132); BTG1(694); C12orf30(80018); |
| | | FLJ20674(54621); KL(9365); KLF12(11278); CDKN3(1033); |
| | | C14orf101(54916); PPP2R5C(5527); EXOC5(10640); ACTN1(87); |
| | | SLC8A3(6547); BTBD7(55727); ELF13(51621); FLJ39531(400360); |
| | | EIF3S1(8669); TCF12(6938); ZWILCH(55055); PML(5371); |
| | | LOC440295(440295); TBK2(146057); ZNF690(146050); CCPG1(9236); |
| | | MYO1E(4643); RKHD3(84206); PAPD5(64282); NFATC3(4775); |
| | | GRIN2A(2903); GSPT1(2935); XYLT1(64131); CNOT1(23019); |
| | | MAF(4094); BIRC4BP(54739); BCL6B(255877); CYB5D1(124637); |
| | | RUNDC1(146923); PPM1E(22843); CBX2(84733); MYOIC(4641); |
| | | ZNF624(57547); SSH2(85464); CRLF3(51379); PLXDC1(57125); |
| | | STAT3(6774); ZNF652(22834); MIB1(57534); IMPACT(55364); |
| | | CCDC68(80323); PIGN(23556); ZNF302(55900); ZNF181(339318); |
| | | RPL13A(23521); ZNF480(147657); ZNF564(163050); C19orf12(83636); |
| | | KIAA1559(57677); ZFP30(22835); ZNF229(7772); RAB22A(57403); |
| | | VAPB(9217); C20orf11(54994); FKBP1A(2280); RNF24(11237); |
| | | GGTL3(2686); RNPC2(9584); PTPRT(11122); BRWD1(54014); |
| | | HMG2L1(10042); APOL6(80830); CTA-250D10.11(164684); |
| | | RBM9(23543); POLR3H(171568); LANCL3(347404); CXorf39(139231); |
| | | IL13RA1(3597); XPNPEP2(7512); FMR1(2332); LOC203547(203547); |
| | | GPM6B(2824); RP13-383K5.1(55285); AMOT(154796); MOSPD1(56180); |
| | | RBMX(27316); TMLHE(55217); |
| hsa-miR-208 | 23; 3429; 448; 449; | SKI(6497); PHF13(148479); KIF1B(23095); VPS13D(55187); |
| | 450; 451; 452; 453; | NPAL3(57185); ZMYM1(79830); ZMYM4(9202); MTF2(22823); |
| | 1370; 1371; | GPR88(54112); SNAPAP(23557); KIAA0446(9673); ATP1A2(477); |
| | | MPZL1(9019); SRGAP2(23380); KCTD3(51133); FBXO28(23219); |
| | | SLC35F3(148641); KMO(8564); CDC2L2(985); RPL22(6146); |
| | | ICMT(23463); DFFA(1676); E2F2(1870); HEYL(26508); F3(2152); |
| | | RIPK5(25778); SLC45A3(85414); ENAH(55740); CHML(1122); |
| | | ZNF496(84838); RSNL2(79745); ABCG8(64241); ANTKR1(84168); |
| | | MAP4K4(9448); ACOXL(55289); CCNT2(905); ADAM23(8745); ALPI(248); |
| | | HS1BP3(64342); RBJ(51277); SP3(6670); KIAA1715(80856); TTN(7273); |
| | | RAPH1(65059); HDAC4(9759); MTERFD2(130916); SRPRB(58477); |
| | | TLOC1(7095); B3GNT5(84002); SLC6A20(54716); LTF(4057); |
| | | MGC40579(256356); KLHL6(89857); LOC285382(285382); CPEB2(132864); |
| | | EREG(2069); CLCN3(1182); RPL9(6133); ASAHL(27 |

TABLE 4-19
163); CXCL9(4283); CAMK2D(817); SLC7A11(23657);
NPY1R(4886); SLC22A5(6584); UBE2D2(7322);
PCDHB3(56132); NPM1(4869); MYO10(4651);
UGT3A1(133688); DKFZP781I1119(166968);
ADAMTS6(11174); FOXQ1(94234); RREB1(6239);
TUBB(203068); RP5-875H10.1(389432); QH3(9444);
RP3-398D13.1(285780); HIST1H2BC(8347);
C6orf125(84300); UBE2J1(51465); HS3ST5(222537);
STX7(8417); FOXK1(221937); WBSCR17(64409);
LMTK2(22853); DLD(1738); TES(26136); LEP(3952);
KIAA0265(23008); LRRC61(65999); WBSCR16(81554);
C7orf21(83590); EFHA2(286097); SLC7A2(6542);
HMBOX1(79618); PHF20L1(51105); BIN3(55909);
PXMP3(5828); MGC21881(389741); C9orf47(286223);
STX17(55014); STXBP1(6812); C9orf7(11094);
AK3(50808); SMU1(55234); KIAA0367(23273);
HEMGN(55363); AKNA(80709); FAM102A(399665);
ECHDC3(79746); PCGF4(648); ANKA8(244);
HIF1AN(55662); CNNM2(54805); KIAA1600(57700);
GPR26(2849);PTPRE(5791);
DIP2C(22982); ZNF25(219749); C10orf13(143282);
MGEA5(10724); SH3PXD2A(9644); PDZD8(118987);
ZNF215(7762); USP47(55031); TCP11L1(55346);
JAM3(83700); VPS26B(112936); FLJ20294(55626);
SSRP1(6749); SYVN1(84447); FLJ38159(220388);
ZW10(9183); IGSF4(23705); BCL9L(283149);
ETS1(2113); TRHDE(29953); RIC8B(55188);
ACACB(32); RECQL(5965); VDR(7421);
SMARCC2(6601); E2F7(144455); NUAK1(9891);
RIMBP2(23504); AKAP11(11215); ATP11A(23250);
KLF12(11278); DOCK9(23348); DHRS4(10901);
DHRS4L2(317749); PPP2R5C(5627);
NFKBIA(4792); MAX(4149); DIO2(1734);
KIAA1446(57596); SGNE1(6447); RYR3(6263);
TPM1(7168); PSMA4(5685); IL16(3603);
LOC440295(440295); SCAND2(54581);
NIPA1(123606); TLE3(7090); STARD5(80765);
PRO0149(29035); MGC35048(124152);
ATP2A1(487); DHODH(1723); JPPH3(57338);
C16orf28(65259); NSMCE1(197370);
BOLA2(552900); N4BP1(9683); CSNK2A2(1459);
ST3GAL2(6483); SLC7A5(8140); ZFP3(124961);
FLJ35934(400579); NLK(51701);
MGC19764(162394); TUBG2(27175);
FLJ42842(440446); HLF(3131); TNRC6C(57690);
FN3KRP(79672); MYO1C(4641); ANKFY1(51479);
GAS7(8522); SREBF1(6720); THRAP1(9969);
CYB561(1534); DDX5(1655); SLC16A6(9120);
SUMO2(6613); GNAL(2774); LIPG(9388);
SMAD4(4089); SOCS6(9306); NPC1(4864);
PSTPIP2(9050); BRUNOL5(60680); FZR1(51343);
ILF3(3609); FLJ21742(84167); UPF1(5976);
ZBTB32(27033); SPIB(6689); CACNG7(59284);
ZNF135(7694); SLC25A23(79085); ELL(8178);
OPA3(80207); FLJ10781(55228); KLK10(5655);
VISA(57506); SLC35C2(51006); KCNG1(3755);
YTHDF1(54915); BTBD4(140685); UBASH3A(53347);
DIP2A(23181); SYNJ1(8867); C21orf55(54943);
RANBP1(5902); FLJ42953(400892); BCR(613);
FLJ31568(150244); RP5-1119A7.4(80020); DD

TABLE 4-20

| | | X17(10521); CELSR1(9620); CXorf15(55787); CNKSR2(22866); |
|---|---|---|
| | | ZC3H12B(340554); PCDH11X(27328); ARSD(414); TAB3(257397); |
| | | ARHGEF9(23229); PCDH11Y(83259); |
| hsa-miR-210 | 24; 454; 455; 456; | CAMTA1(23261); NMNAT2(23057); INHBB(3625); SLC25A26(115286); |
| | 457; 458; 459; 460; | UNQ6125(442092); ADCY5(111); FGFRL1(53834); WHSC1(7468); |
| | | KIAA0141(9812); HIVEP2(3097); FKBP9(11328); DKFZP434A0131(54441); |
| | | FKBP9L(360132); LOC442582(442582); TNPO3(23534); SCARA3(51435); |
| | | SHB(6461); GPR123(84435); IGF2(3481); ACVR1B(91); RAD52(5893); |
| | | GIT2(9815); ATP11A(23250); F7(2155); Gcom1(145781); MGRN1(23295); |
| | | FBXO31(79791); FLJ40194(124871); MNT(4335); PIK4R5(23533); |
| | | NPTX1(4884); KCNJ15(3772); KIAA1904(114794); ATP2B3(492); |
| | | COVA1(10495); PDZD4(57595); ABO(28); ADCY7(113); ABCD1(215); |
| | | APBA2(321); AQP4(361); ASCL1(429); KIF1A(547); BDKRB2(624); |
| | | BMP6(654); CA12(771); CACNA1A(773); CAMK2B(816); RUNX1T1(862); |
| | | RUNX3(864); CKBR(887); CCNG2(901); CD22(933); CD59(966); |
| | | CHES1(1112); CHN1(1123); CHRM3(1131); CHRNB1(1140); CCBP2(1238); |
| | | CNGA4(1262); CNP(1267); COX10(1352); CR1(1378); CSF1(1435); |
| | | CSF2RB(1439); CSNK1E(1454); DLX1(1745); DRD5(1816); DSC3(1825); |
| | | DSG1(1828); DTX1(1840); TOR1A(1861); E2F3(1871); EFNA3(1944); |
| | | EPHA2(1969); CTTN(2017); EPB41L1(2036); FANCF(2188); FOXD2(2306); |
| | | FLNC(2318); GCNT1(2650); GGTL3(2686); GNA15(2769); GNAT1(2779); |
| | | GNG7(2788); GPR17(2840); GRIN2A(2903); GRM6(2916); HK3(3101); |
| | | HMGCS1(3157); TLX1(3195); PRMT2(3275); INPP5A(3632); INPP5D(3635); |
| | | INSIG1(3638); KIF5A(3798); KPNA1(3836); RANBP5(3843); AFF3(3899); |
| | | LAIR1(3903); |
| hsa-miR-211 | 25; 461; 462; 463; | PHF13(148479); PRDM2(7799); POGK(57645); PRAMEF8(391002); |
| | 464; 465; 466; | GPATC4(54865); WDR26(80232); TMEM63A(9725); ZNF496(84838); |
| | 1372; 1373; 1374; | SOX11(6664); TMEM127(55654); RBMS3(27303); NKTR(4820); |
| | 1375; 1376; 1377; | RBM15B(29890); SMARCA3(6596); AFF1(4299); ELOVL6(79071); |
| | 1378; 1379; 1380; | ARHGAP26(23092); SGCD(6444); SEMA5A(9037); SEMA6A(57556); |
| | 1381; 1382; 1383; | RUNX2(860); RP5-875H10.1(389432); ATXN1(6310); DJ122O8.2(57226); |
| | 1384; 1385; 1386; | CREB5(9586); DRCTNNB1A(84668); HOXA13(3209); SLC37A3(84255); |
| | 1387; 1388; 1389; | DUSP4(1846); MGC21881(389741); NTRK2(4915); SH3PXD2A(9644); |
| | 1390; 1391; | FLJ13848(79829); LOC220070(220070); ANKRD13(88455); GALNT4(8693); |
| | | NUAK1(9891); EXOSC8(11340); STARD13(90627); KLF12(11278); |
| | | SYNJ2BP(55333); BTBD7(55727); GREM1(26585); SPRED1(161742); |
| | | THBS1(7057); CCDC55(84081); DHX8(1659); PPM1E(22843); DSG3(1830); |
| | | APOE(348); PRKACA(5566); ATRN(8455); RAB22A(57403); PTPRT(11122); |
| | | DYRK1A(1859); BRWD1(54014); TNRC6B(23112); RBM9(23543); |
| | | TMEM28(27112); SPRY3(10251); |
| hsa-miR-214 | 26; 467; 468; 469; | KCNAB2(8514); CCDC21(64793); ARID1A(8289); WDTC1(23038) |
| | 470; 471; 472; 47 | |

TABLE 4-21

| | |
|---|---|
| 3; 474; 475; 476; | ; KIAA1522(57648); NSUN4(387338); CSF1(1435); MOV10(4343); |
| 477; 478; 479; 480; | VANGL1(81839); ZNF364(27246); C1orf60(65123); LMNA(4000); |
| 481; 482; 483; 1392; | VANGL2(57216); QSCN6(5768); PPP1R12B(4660); ATP2B4(493); |
| | C1orf95(375057); PEX10(5192); TNFRSF14(8764); SLC9A1(6548); |
| | WASF2(10163); KIAA0319L(79932); COL8A2(1296); RIMS3(9783); |
| | CDC42SE1(56882); GPA33(10223); KIF21B(23046); LMOD1(25802); |
| | ENAH(55740); TMEM63A(9725); WNT9A(7483); KCNK3(3777); |
| | DPYSL5(56896); FOSL2(2355); SH3BP4(23677); LOC339768(339768); |
| | ASB1(51665); FLJ45964(401040); CYS1(192668); TGOLN2(10618); |
| | LIMS2(55679); TMEM43(79188); DLEC1(9940); CDGAP(57514); |
| | SRGAP3(9901); MRPS25(64432); ZNF445(353274); TMEM110(375346); |
| | IL17RD(54756); MGLL(11343); MASP1(5648); WHSC1(7568); |
| | SH3BP2(6452); HD(3064); D4S234E(27065); NDST1(3340); |
| | SQSTM1(8878); TPPP(11076); AYTL2(79888); SEMA5A(9037); |
| | LOC51149(51149); PACSIN1(29993); RNF8(9025); TULP4(56995); |
| | QKI(9444); KIAA1838(84498); MOCS1(4337); TTYH3(80727); |
| | FOXK1(221937); TRRAP(8295); TRIAD3(54476); CALN1(83698); |
| | UBE2H(7328); DLGAP2(9228); TNKS(8658); RBM13(84549); |
| | RHPN1(114822); PSD3(23362); LZTS1(11178); FGFR1(2260); |
| | OPRK1(4986); FBXO32(114907); LYNX1(66004); DGAT1(8694); |
| | ADAMTSL1(92949); NTRK2(4915); C9orf47(286223); C9orf28(89853); |
| | C9orf7(11094); PTGDS(5730); UAP1L1(91373); ANKS6(203286); |
| | TRAF1(7185); VAV2(7410); QSCN6L1(169714); C9orf111(375775); |
| | KIAA1274(27143); SEC24C(9632); PAX2(5076); SORBS1(10580); |
| | HPSE2(60495); FAM53B(9679); TMEM86A(144110); C11orf11(747); |
| | FKSG44(83786); RAB1B(81876); PELI3(246330); RMB14(10432); |
| | ADRBK1(156); CBL(867); PDDC1(347862); POLR2L(5441); CD59(966); |
| | NUMA1(4926); TMPRSS13(84000); TRIM29(23650); LRTM2(654429); |
| | FLJ20489(55652); ACVR1B(91); MLXIP(22877); SETD8(387893); |
| | VDR(7421); PITPNM2(57605); SPATA13(221178); ATP11A(23250); |
| | RNF31(55072); LTB4R2(56413); KIAA0247(9766); SMOC1(64093); |
| | PSEN1(5663); TCL1B(9623); TRAF3(7187); KIAA0125(9834); |
| | JPH4(84502); RAB15(376267); PGF(5228); FLJ22795(80154); |
| | AKAP13(11214); IGF1R(3480); AHRGDIG(398); FLJ36208(283948); |
| | RAB40C(57799); KIAA1924(197335); TRAF7(84231); PDPK1(5170); |
| | FLYWCH1(84256); JMJD5(79881); ARMC5(79798); GNAO1(2775); |
| | RPL13(6137); RPUSD1(113000); CASKIN1(57524); DOK4(55715); |
| | TK2(7084); CMTM4(146223); SLC12A4(6560); GARNL4(23108); |
| | KSR1(8844); SARM1(23098); SUPT6H(6830); RAB11FIP4(84440); |
| | MAPT(4137); PNPO(55163); BAIAP2(10458); FOXK2(3607); |
| | TBCD(6904); SCARF1(8578); ATP2A3(489); FLJ40504(284085); |
| | FLOT2(2319); MYO1D(4642); TCF2(6928); KRTAP44(84616); |
| | TBC1D16(125058); MAFG(4097); MGC26694(284439); |

TABLE 4-22

| | | |
|---|---|---|
| | | KCTD15(79047); RAB4B(53916); DMRTC2(63946); RPS11(6205); |
| | | ACPT(93650); RP128(6158); ZNF264(9422); C19orf6(91304); |
| | | MBD3(53615); SLC39A3(29985);SH3GL1(6455); FUT6(2528); |
| | | FUT3(2525); FUT5(2527); RTN2(6253); DMWD(1762); CBFA2T2(9139); |
| | | M4P24(10893); C20orf35(55861); PTPN1(5770); SLC23A2(9962); |
| | | PLAG142(5326); ZHX3(23051); PTPRT(11122); PREX1(57580); |
| | | PDXK(8566); D21S2056E(8568); TRPM2(7226); SETD4(54093); |
| | | SNF1LK(150094); C21orf93(246704); SEPT5(5413); P2RX11(9127); |
| | | LOC400891(400891); PPTL2(23759); FLJ20699(55020); DGCR2(9993); |
| | | FLJ21125(79680); LOC888886(388886); POLR3H(171568); |
| | | C22orf9(23313); FLJ41993(400935); TUBGCP6(85378); OATL1(4943); |
| | | ARHGAP6(395); LDOC1(23641); MECP2(4204); |
| hsa-miR-218 | 27; 484; 485; 486; 487; | H6PD(9563); PIK3CD(5293); DNAJC16(23341); LDLRAD2(401944); |
| | 488; 489; 490; 491; 492; | ZBTB8(127557); C1orf84(149469); CCDC76(54482); SLC6A17(388662); |
| | 493; 494; 495; 496; 497; | HIPK1(204851); SEMA4A(64218); C1orf21(81563); TRAF5(7188); |
| | 498; 499; 500; 3430; 501; | FLJ12505(79805); C1orf69(200205); DISC1(27185); GPR153(387509); |
| | 502; 503; 504; 505; | ERRFI1(54206);RAB3B(5865); TTC22(55001); VAV3(10451); |
| | | KCNA3(3788); POLRBC(10623); ZA20D1(56957); CTSS(1520); |
| | | GPR161(23432); MRPS14(63931); KIF21B(23046); USH2A(7399); |
| | | ENAH(55740); GNG4(2786); AKT3(10000); PPP1CB(5500); SPTBN1(6711); |
| | | MRPL19(9801); KCNIP3(30818); TSN(7247); CCNT2(905); GPD2(2820); |
| | | HNRPA3(220988); CASP10(843); CREB1(1385); HRB(3267); |
| | | ATG16L1(55054); GFPT1(2673); CACNB4(785); FLJ13984(79828); |
| | | TATDN2(9797); SLC6A1(6529); MOBP(4336); ROBO2(6092); |
| | | IGSF4D(253559); SEC61A1(29927); UNQ6125(442092); SRPRB(58477); |
| | | SENP5(205564); TBC1D5(9779); SATB1(6804); GADL1(339896); |
| | | TMEM110(375346); SFMBT1(51460); LRIG1(26018); CGGBP1(8545); |
| | | DCBLD2(131566); SERP1(27230); EIF5A2(56648); LOC285382(285382); |
| | | LOC348840(348840); SLIT2(9353); KLHL5(51088); DCUN1D4(23142); |
| | | THAP6(152815); RAB33B(83452); KIAA1729(85460); MLR1(254251); |
| | | FLJ20273(54502); RASSF6(166824); FAM18A1(10144); SH8D19(152503); |
| | | SFRP2(6423); C4orf18(51313); HPGD(3248); FLJ39155(133584); |
| | | KIF2(3796); FCHO2(115548); HEXB(3074); JMY(133746); CAMK4(814); |
| | | LOC90624(90624); CDC42SE2(56990); ARHGAP26(23092); SGCD(6444); |
| | | UBXD8(23197); SEMA5A(9037); PRLR(5618); MOCS2(4338); |
| | | DKFZP781I1119(166968); MRPS27(23107); LHFPL2(10184); |
| | | MGC23909(153339); LYSMD3(116068); C5orf21(83989);SEMA6A (57556); |
| | | LOX(4015); FBN2(2201); SAR1B(51128); STK10(6793); |
| | | C6orf201(404220); RUNX2(860); FHL5(9457); C6orf71(389434); |
| | | TXNDC5(81567); ELOVL2(54898); DCDC2(51473); RP3-377H14.5(285830); |
| | | NUDT3(11165); MDGA1(266727); ICK(22858); EGFR(1956); |
| | | CNTNAP2(26047); TMED4(222068); ECOP(81562); CALN1(836 |

TABLE 4-23
98); CDK6(1021); NAPE-PLD(222236); WASL(8976);
CLEC5A(23601); TACC1(6867); MGC34646(157807);
C8orf38(137682); PLEKHF2(79666); SGCZ(137868);
PSD3(23362)2MAT4(79698); PLAG1(5824);
JPH1(56704); TPD52(7163); PAG1(55824);
FBXO32(114907); NTRK2(4915); C9orf47(286223);
PALM2 (114299); LRRC19(64922); RNF38(152006);
RASEF(158158); DIRAS2(54769); TOR1A(1861);
DHTKD1(55526); ARL5B(221079); PCGF4(648);
ZNF33A(7581); ZNF37A(7587); HECT792(143279);
NUDT5(11164); NEBL(10529); C10orf25(220979);
RHOBTB1(9886); NODAL(4838); C10orf55(414236);
AP3M1(26985); FAM26C(255022); KIAA1598(57698);
EBF3(253738); TUB(7275); TEAD1(7003);
SPON1(10418); VMD2(7439); LOC899947(399947);
SNF1LK2(23235); TMEM25(84866); PLEKHA7(144100);
SLC1A2(6506); CLCF1(23529); SHANK2(22941);
GAB2(9846); DDX6(1656); B3GAT1(27087);
PRH2(5555); SSPN(8082); FGD4(121512);
FLJ20489(55652); SLC16A7(9194); GLIPR1(11010);
CLLU1(574028); KIAA1853(84530);
TMEM1328(114795); BCAT1(586); IPO8(10526);
SFRS2IP(9169); LIN7A(8825); FAM109A(144717);
FLJ20674(54621); EIF2B1(1967); RIMBP2(23504);
EPIM(2054); WASF3(10810); RFXAP(5994);
CYSLTR2(57105); DCAMKL1(9201); LHFP(10186);
ELF12(11278); EFNB2(1948);
DKFZp451A211(400169); TXNDC(81542);
C14orf168(83544); C1orf118(55668);
OTUB2(78990); EGLN3(112399); MAMDC1(161357);
TRIM9(114088); ZFYVE26(23503); ABCD4(5826);
CHES1(1112); GREM1(26585); GLCE(26035);
SCAMP5(192683); SCAND2(54581); KIAA1794(55215);
GABRB3(2562); VPS13C(54832); LOC114984(114984);
ITGAL(3683); LIN10(80262); NFATC3(4775);
KIAA0513(9764); KIAA0182(23199); ZNF434(54925);
ADCY9(115); SLC7A6OS(84138); MGC3101(79007);
TUSC5(286753); RABEP1(9135); MYOCD(93649);
TNFAIP1(7126); LASP1(3927); MAPT(4137);
CACNA1G(8913); FLJ44815(400591); PCGF2(7703);
KA36(125115); VAT1(10493); BRCA1(672);
ANKRD40(91369); MAFG(4097); ANKRD12(28253);
RNF165(494470); MC2R(4158); BTBD14B(112939);
RAB8A(4218); GLT25D1(79709); CSPG3(1463);
ZFP28(140612); INSR(8643); ZNF44(51710);
RP5-1103G7.6(400830); ATRN(8455); PCSK2(5126);
PHF20(51230); KCNK15(60598); SLC9A8(23315);
PARD6B(84612); RAB22A(57403); SCRT2(85508);
RASSF2(9770); SLC23A2(9962); RBBP9(10741);
CHD6(84181); PTPRT(11122); SON(6651);
SLC5A3(6526); ETS2(2114); ADAMTS5(11096);
CRYZL1(9946); KCNE1(3753); ZDHHC8(29801);
KDELR3(11015); SYNGR1(9145); SERHL(94009);
SERHL2(253190); DIP(23151); APKL(357);
FRMPD4(9758); YIPF6(286451); EDA(1896);
DDX26B(203522); MTMR1(8776); BRCC3(79184);
SYBL1(6845); PRKX(5613); FAM9B(171483);
AP1S2(8905); RNF12(51182); ZDHHC15(1

TABLE 4-24

| | | |
|---|---|---|
| | | 58866); SEPT6(23157); MOSPD1(56180); CETN2(1069); MECP2(4204); |
| | | PRKY(5616); |
| hsa-miR-299-5p | 28; 3431; 3432; | KIF1B(23095); LAX1(54900); RSBN1(54666); TSPAN2(10100); |
| | 506; | ZAK(51776); CAB39(51719); DQX1(165645); SEC22L3(9117); |
| | | ROBO1(6091); CPEB2(132864); RBPSUH(3516); RASSF6(166824); |
| | | GLRA3(8001); LOC285636(285686); DCTN4(51164); PRPF4B(8899); |
| | | TRAM2(9697); Ells1(222166); PURB(5814); GRB10(2887); |
| | | FAM3C(10447); SLC35B4(84912); PHYHIPL(84457); SH2D4B(387694); |
| | | INPP5F(22876); INPP5A(3632); ITIH5(80760); PDHX(8050); |
| | | PRSS23(11098); HBXAP(51773); SURB7(9412); KETLG(4254); |
| | | HSMPP8(64737); KCTD12(115207); DCT(1638); C14orf24(283635); |
| | | PLDN(26258); ABHD2(11057); C15orf29(79768); GNPTG(84572); |
| | | MKL2(67496); POLDIP2(26073); FLJ26175(388566); ZNF585A(199704); |
| | | TNRC6B(23112); CLCN5(1184); NLGN3(54413); CLDN2(9075); |
| | | ABCA1(19); ABL2(27); ABO(28); ABR(29); ALCAM(214); AKR1B1(231); |
| | | AMFR(267); AMPD1(270); ANXA7(310); ARG2(384); ARHGAP5(394); |
| | | ARNT(405); RERE(473); BACH1(571); BARD1(580); BCR(613); |
| | | PRDM1(639); DST(667); CA2(760); CALCR(799); CALD1(800); |
| | | CALU(813); CAPN2(824); CAV1(857); CCNG1(900); CD5(921); |
| | | CD28(940); CD86(942); LRBA(987); CDKN1A(1026); CHES1(1112); |
| | | CHM(1121); CLK1(1195); MAP3K8(1326); CLDN4(1364); |
| | | CREB1(1385); ATF2(1386); CREM(1390); CRIP1(1396); CRY1(1407); |
| | | CS(1431); CSRP2(1466); CYP2J2(1573); DBT(1629); DEFB4(1673); |
| | | NQO1(1728); DIAPH1(1729); DLX2(1746); DNMT2(1787); DPYSL3(1809); |
| | | DVL3(1857); EDNRB(1910); |
| hsa-miR-325 | 29; 3433; 3434; | RBBP4(5928); DNM3(26052); PPP1R12B(4660); LAX1(54900); |
| | 507; 508; | RAB7L1(8934); C1orf75(55248); HNMT(3176); ZAK(51776); |
| | | SLC16A14(151473); DIRC2(84925); PRICKLE2(166336); TNIK(23043); |
| | | TNPO1(3842); SGCD(6444); MGC23909(153339); LARS(51520); |
| | | ST3GAL1(6482); ZNF483(158399); TRIM14(9830); CD59(966); |
| | | CUGBP1(10658); HNRPA1(3178); NT5DC3(51559); KIAA0753(9851); |
| | | AP1GBP1(11276); KDELR3(11015); CXorf15(55787); EDA2R(60401); |
| | | ABCA1(19); ACACB(32); ADRBK2(157); ALDOB(229); BIRC4(331); |
| | | ARL1(400); ATP1B1(481); BAAT(570); BAK1(578); BCAT1(586); |
| | | BRCA1(672); KLF9(687); C9(735); C18orf1(753); CACNB3(784); |
| | | CALD1(800); CANX(821); CASP9(842); RUNX2(860); CBL(867); |
| | | KRIT1(889); CDH2(1000); CEACAM7(1087); RCC1(1104); CHRNA7(1139); |
| | | CHRNB1(1140); CKS1B(1163); CCR1(1230); CNP(1267); COX11(1353); |
| | | CRK(1398); CS(1431); CSNK1A1(1452); CSNK1G3(1456); CTSO(1519); |
| | | DCN(1634); DCX(1641); DNASE2(1777); DNTT(1791); EDA(1896); |
| | | EDN1(1906); EGFR(1956); EIF4EBP2(1979); ELAVL1(1994); STOM(2040); |
| | | EPHA3(2042); EPIM(2054); ERBB4(2066); EYA4(2070); ESR1(2099); |
| | | FECH(2235); FOXO3A(2309); |

TABLE 4-25

| | | |
|---|---|---|
| | | FMO2(2327); FSHB(2488); GABRA3(2556); GABRA4(2557); GABRB2(2561); |
| | | GABRG2(2566); GANC(2595); GLRA2(2742); GNAI3(2773); GNAZ(2781); |
| | | GPM6A(2823); GPR26(2849); GSPT1(2935); HLA-DOA(3111); HNRPH3(3189); |
| | | HSD3B1(3283); ID1(3397); IDS(3423); IFIT1(3434); IL3RA(3563); |
| hsa-miR-328 | 30; 509; 510; | TTLL10(254173); VWA1(64856); KCNAB2(8514); KIP1B 23095); |
| | 511; | VPS13D(55187); KLHDC7A(127707); MAN1C1(57134); SEPN1(57190); |
| | | CDC20(991); PDE4B(5142); CYB561D1(284613); FAM40A(85369); |
| | | IER5(51278); C1orf21(81563); C1orf95(375057); CTNNBIP1(56998); |
| | | MTHFR(4524); ZNF436(80818); RUNX3(864); PAFAH2(5051); BSDC1(55108); |
| | | CSMD2(114784); SLC2A1(6513); FLJ32011(148930); C1orf183(55924); |
| | | PIK4CB(5298); TNRC4(11189); GBA(2629); STX6(10228); NMNAT2(23057); |
| | | LMOD1(25802); C1orf147(574431); MGC11266(79172); EMX1(2016); |
| | | FLJ12788(64427); BCL2L11(10018); ZAK(51776); NRP2(8828); |
| | | FLJ43374(377007); CAPN10(11132); ATG4B(23192); SERTAD2(9792); |
| | | ANKRD23(200539); ACTR1B(10120); LIMS2(55679); NR2C2(7182); |
| | | TGM4(7047); LIMD1(8994); C30orf40(131408); USP4(7375); GMPPB(29925); |
| | | CHDH(55349); MAGI1(9223); UROC1(131669); LRRC15(131578); FGFR3(2261); |
| | | WHSC1(7468); SH3BP2(6452); SYNPO2(171024); SLC26A1(10861); |
| | | LETM1(3954);STX18(53407); AFAP(60312); GABRA4(2557); KIAA1909(153478); |
| | | SGCD(6444); NSD1(64324); SH3PXD2B(285590); PPP1R11(6992); |
| | | PACSIN1(29993); DAAM2(23500); TNRC5(10695); RNF39(80352); |
| | | C6orf106(64771); MOCS1 (4337); GTPBP2(54676); IQCE(23288); TTYH3(80727); |
| | | ADCY1(107); SUMF2(25870); FLJ10099(55069); LIMK1(3984); CUTL1 (1523); |
| | | BCAP29(55973); LEP(3952); LOC90639(90639); VPS41(27072); NUDCD3(23386); |
| | | TMED4(222068); TMPIT(83862); DKFZP434B0335(25851); KIAA0773(9715); |
| | | DLGAP2(9228); EIF4EBP1(1978); C8orf55(51387); RHPN1(114822); |
| | | LRRC14(9684); SFRP1(6422); ANK1(286); RUNX1T1(862); LYNX1(66004); |
| | | C9orf94(206938); NTRK2(4915); MAK10(60560); GADD45G(10912); PAPPA(5069); |
| | | OLFML2A(169611); PPP2R4(5524); POMT1(10585); KCNT1(57582); PTGDS(5730); |
| | | UNQ470(375704); PAX5(5079); APBA1(320); BICD2(23299); ABO(28); |
| | | CHST3(9469); RAI17(57178); UBTD1(80019); HIF1AN(55662); NEURL(9148); |
| | | KNDC1(85442); LARP5(23185); CXCL12(6387); MARCH8(220972); SPOCK2(9806); |
| | | SH3FXD2A(9644); FLJ46300(399827); LRRC56(115399); C11orf36(283303); |
| | | SSSCA1(10534); RBM14(10432); SLC15A3(51296); VPS37C(55048); SYVN1(84447); |
| | | SLC29A2(3177); SHANK2(22941); BCL9L(283149); NUDT4(11163); |
| | | KIAA1853(84530); FMNL3(91010); FAIM2(23017); MAP3K12(7786); |
| | | PHLDA1(22822); C12orf43(64897); ATP8A2(51761); RAD51L1(5890); DLST(1743); |
| | | VASH1(22846); KIAA1822( |

TABLE 4-26

| | | |
|---|---|---|
| | | 84439) ;KIAA0329(9895); PACS2(23241); KIAA0125(9834); |
| | | SIX4(51804); TMED10(10972); CHRNA7(1139); PAK6(56924); |
| | | SMAD3(4088); PML(5371); ARID3B(10620); ALPK3(57538); |
| | | ISG20L1(64782); CHRFAM7A(89832); LSM16(80153); |
| | | C15orf17(57184); FLJ22795(80154); AP3S2(10239); MPG(4350); |
| | | KIAA1924(197335); A2BP1(54715); KIAA0350(23274); |
| | | UBPH(56061); ATXN2L(11273); NDRG4(65009); LOC348174(348174); |
| | | MGC34761(283971); FLJ45121(400556); CDT1(81620); PKD1(5310); |
| | | TXNTDC11(51061); GP2(2813); DOK4(55715); CMTM4(146223); |
| | | RANBP10(57610); LOC497190(497190); SLC7A5(8140); HIC1(3090); |
| | | GARNL4(23108); KCNJ12(3768); SARM1(23098); RAB11FIP4(84440); |
| | | UNC45B(146862); CNP(1267); PSME3(10197); G6PC(2538); |
| | | CD300LG(146894); NXPH3(11248); PRKCA(5578); SEC14L1(6397); |
| | | TMC8(147138); BAIAP2(10458); CRK(1398); MNT(4335); |
| | | CAMKK1(84254); ANKFY1(51479); ZBTB4(57659); HAP1(9001); |
| | | MPP2(4355); HOXB4(3214); RNF43(54894); LIMD2(80774); |
| | | NAT9(26151); RECQL5(9400); TBC1D16(125058); NPTX1(4884); |
| | | FLJ46026(400627); TMEM105(284186); C17orf70(80233); NPLOC4(55666); |
| | | PYCR1(5831); DUS1L(64118); CABLES1(91768); TCEB3C(162699); |
| | | GRIN3B(116444) ;APC2(10297); REEP6(92840); DOT1L(84444); |
| | | FZR1(51343); ARHGEF18(23370); CC2D1A(54862); HNRPUL1(11100); |
| | | LENG8(114823); HKR2(342945); POLR2E(5434); MBD3(53615); |
| | | SH3GL1(6455); TIMM44(10469); FLJ23447(79883); LASS1(10715); |
| | | FLJ41131(284325); KCNA7(3743); SNPH(9751); MRPS26(64949); |
| | | PYGB(5834); ACSS2(55902); MMP24(10893); NNAT(4826); |
| | | RAB22A(57403); NTSR1(4923); FOXA2(3170); CD93(22918); |
| | | C20orf112(140688); PTPRT(11122); PTGIS(5740); LAMA5(3911); |
| | | CHRNA4(1137);FLJ41733(400870); PDXK(8566); NRIP1(8204); |
| | | HEMK2(29104); LSS(4047); DGCR8(54487); P2RXL1(9127); |
| | | MMP11(4320); NF2(4771); APOBEC3F(200316); TRMU(55687); DIP(23151); |
| | | CECR6(27439); HTF9C(27037); YPEL1(29799); PPM1F(9647); DERL3(91319); |
| | | NPTXR(23467); BC002942(91289); OATL1(4943); MAGEA8(4107); |
| | | SPRY3(10251); IL9R(3581); PCYT1B(9468); SLC35A2(7355); |
| | | IQSEC2(23096); OPHN1(4983); DCX(1641); MAGEA11(4110);MECP2(4204); |
| hsa-miR-329 | 31; 512; 513; 514; | ARHGEF10L(55160); UBXD3(127733); LIN28(79727); TEAP2E(339488); |
| | 1393; 1394; 1395; | FLJ45337(400754); AK3L1(205); SLC6A17(388662); RAP1A(5906); |
| | | HIPK1(204851); VANGL1(81839); NOTCH2NL(388677); IGSF4B(57863); |
| | | QSCN6(5768); PPFIA4(8497); C1orf95(375057); SDC3(9672); |
| | | FLJ38984(127703); PRNPIP(79033); MOBKL2C(148932); SERBP1(26135); |
| | | RP5-998N21.6(440686); RP11-196G18.6(440689); ENSA(2029); |
| | | MEF2D(4209); C1orf24(116496); C1orf116(79098); AKT3(10000); |
| | | ZNF496(84838); KLF11(8462); PRKCE(558 |

TABLE 4-27
1); ABI2(10152); NRP2(8828); MAP2(4133);
RPE(6120); COPS7B(64708); INPP5D(3635);
ATG4B(23192); DUSP2(1844); MGAT4A(11320);
ERBB4(2066); TNS1(7145); IL8RA(3577);
EPHA4(2043); ARL4C(10123); C2orf19(394261);
TATDN2(9797); ZNF621(285268); LIMD1(8994);
ACPP(55); RNF7(9616); RAP2B(5912);
SRGAP3(9901); ZNF445(353274); CAMKV(79012);
IL17RD(54756); PTPLB(201562); RAB6B(51560);
KPNA4(3840); ABCC5(10057); PCGF3(10336);
WHSC1(7468); MED28(80306); AFF1 (4299);
ABLIM2(84448); MAP2K1IP1(8649); PDE5A(8654);
LOC152485(152485); KIAA1909(153478);
FAM105B(90268);PCDHB9(56127); MYOZ3(91977);
GALNT10(55568); ERGIC1(57222); CPLX2(10814);
SLC34A1(6569); N4BP3(23138); BRD9(65980);
KENAE(202243); SEMA6A(57556);
KIAA1893(114787); LMAN2(10960);
C6orf151(154007); SYNGAP1(8831);
TCF21(6943); C6orf71(389434); ATXN1(6310);
NUDT3(11165); C6orf106(64771); MDGA1(266727);
GPR116(221395); TRAM2(9697); MDN1(23195);
ASCC3(10973); STX7(8417); AGPAT4(56895);
MAFK(7975); FOXK1(221937); RALA(5898);
PRKRIP1(79706); MET(4233); ECOP(81552);
NAPE-PLD(222236); FLJ36031(168455);
UBE2H(7328); MTPN(136319); MKRN1(23608);
TNKS(8658); SOX17(64321); PTDSS1(9791);
RAB11FIP1(80223); PLAT(5327); FBXO32(114907);
ST3GAL1(6482); LYNX1(66004); C9orf47(286223);
FGD3(89846); PHF2(5253); PALM2-AKAP2(445815);
FREQ(23413); RXRA(6256); FLJ36268(401563);
AQP3(360); C9orf25(203259); GBA2(57704);
SHB(6461); APBA1(320); ANKS6(203286);
TSC1(7248); HSPA14(51182); LOC196752(196752);
CCNJ(54619); NANOS1(340719); CXCL12(6387);
SYT15(83849); C10orf72(196740); ZWINT(11130);
SMNDC1(10285); ABLIM1(3983); FRAG1(27315);
TPCN2(219931); CTTN(2017); SNF1LK2(23235);
SIRT3(23410); IGF2(3481); FBXO3(26273);
SLC1A2(6506); AHNAK(79026); SPTBN2(6712);
MCAM(4162); OPCML(4978); RAB6IP2(23085);
LOH12CR1(118426); FLJ20489(55652); HOXC10(3226);
RBMS2(5939); MON2(23041); TMEM132B(114795);
CDCA3(83461); ITPR2(3709); ARF3(377);
THRAP2(23389); C12orf49(79794); SPATA13(221178);
AKAP11(11215); TNFSF11(8600); HS6ST3(266722);
KIAA0323(23351); PELI2(57161); DLST(1743);
TRAF3(7187); JUB(84962); WDR22(8816);
DPF3(8110); SPTLC2(9517); C14orf143(90141);
C14orf139(79686); CDCA4(55038); KLF13(51621);
KIAA1024(23251); LOC440295(440295);
RCCD1(91433); IGF1R(3480); CDAN1(146059);
CLN6(54982); SCAMP2(10066); MESDC2(23184);
KIAA0350(23274); DREV1(51108); HSPC065(29070);
USP7(7874); RPS15A(6210); STX1B2(112755);
KCTD11(147040); NLGN2(57555); CDK5RAP3(80279);
PPM1D(8493); TLK2(11011); CBX2(84733); ABR(29);
FXR2(9513); NUFIP2(57532); PCGF2(7703); PE

TABLE 4-28

| | | |
|---|---|---|
| | | RLD1(93210); DUSP3(1845); SCN4A(6329); GNA13(10672); |
| | | USH1G(124590); TK1(7083); USP36(57602); CBX8(57332); |
| | | MAFG(4097); CSNK1D(1453); CABLES1(91768); SMAD4(4089); |
| | | C18orf19(125228); SYT4(6860); FSTL3(10272); GATAD2A(54815); |
| | | GRLF1(2909); LOC390980(390980); ZNF304(57343); GNG7(2788); |
| | | TNPO2(30000); EMR2(30817); BRD4(23476); AKT2(208); |
| | | CARD8(22900); DLGAP4(22839); PTPN1(5770); DNAJC5(80331); |
| | | ADAM33(80332); RNF24(11237); BLCAP(10904); KCNS1(3787); |
| | | B4GALT5(9334); NFATC2(4773); BMP7(655); BTBD4(140685); |
| | | PDXK(8566); ADARB1(104); TSSK2(23617); HIC2(23119); |
| | | NF2(4771); GGA1(26088); TNRC6B(23112); TEF(7008); |
| | | PANX2(56666); PPM1F(9647); TOB2(10766); TBL1X(6907); |
| | | PRRG1(5638); LANCL3(347404); HMGB3(3149); |
| hsa-miR-338 | 32; 3435; 515; 3436; | VAMP3(9341); TNFRSF1B(7133); SLC25A34(284723); |
| | 516; 517; 518; 519; | ZDHHC18(84243); KIAA1522(57648); LEPROT(54741); |
| | 520; 521; | PTGFR(5737); TMEM56(148534); ATF6(22926); BAT2D1(23215); |
| | | LAMC1(3915); IPO9(55705); C1orf107(27042); HHAT(55733); |
| | | C1orf69(200205); DISC1(27185); C1orf71(163882); |
| | | KLHL21(9903); EPHA2(1969); SDC3(9672); KIAA0319L(79932); |
| | | MYCL1(4610); TESK2(10420); FLJ32011(148930); SPATA6(54558); |
| | | C1orf123(54987); RBMXL1(494115); SV2A(9900); GPATC4(54865); |
| | | KIAA0040(9674);ABL2(27); SYT2(127833); TOMM20(9804); |
| | | PPP1CB(5500); PPM1B(5495); NPAS2(4862); IL1F5(26525); |
| | | ZFAND2B(130617); DNAJB2(3300); ITGB1BP1(9270); |
| | | SUPT7L(9913); SFXN5(94097); TBC1D8(11138); WDR33(55339); |
| | | ORC4L(5000); CACNB4(785); ARL4C(10123); MTERFD2(130916); |
| | | CHL1(10752); IGSF4D(253559); C3orf28(26355); NUDT16(131870); |
| | | FAM62C(83850); EIF2A(83939); PPM1L(151742); SRGAP3(9901); |
| | | LOC401052(401052); GORASP1(64689); ZNF445(353274); |
| | | IHPK2(51447); IL17RD(54756); PTPLB(201562); ITGB5(3693); |
| | | XRN1(54464); ZNF141(7700); FRAS1(80144); CYP2U1(113612); |
| | | KIAA1727(85462); LETM1(3954); SLA/LP(51091); PPEF2(5470); |
| | | SLC7A11(23657); OTUD4(54726); FLJ38482(201931); RWDD4A(201965); |
| | | WDR55(54853); GALNT10(55568); ERGIC1(57222); FLJ22318(64777); |
| | | C5orf4(10826); COL19A1(1310); RP5-875H10.1(389432); |
| | | ULBP1(80329); TRAM2(9697); BVES(11149); SCML4(256380); |
| | | C6orf54(26236); LFNG(3955); TRRAP(8295); CNTNAP2(26047); |
| | | CSGlcA-T(54480); UBE3C(9690); DNAJB6(10049); DGKB(1607); |
| | | CYCS(54205); COPG2(26958); FLJ40852(285962); KIAA0773(9715); |
| | | CLN8(2055); TNKS(8658); SLC39A14(23516); KIAA1967(57805); |
| | | GPR124(25960); DEPDC2(80243); SLC26A7(115111); LYNX1(66004); |
| | | TPD52L3(89882); C9orf103(414328); NTRK2(4915); |
| | | C9orf47(286223); ZNF483(158399); PAPPA(5069); NUP214(8021); |
| | | CD72(971); ZBTB5(9925); SHB(6461); FANCC(2176); RAB14(5 |

TABLE 4-29

| | | |
|---|---|---|
| | | 1552); FAM102A(399665); C9orf90(203245); TSC1(7248);SURF(6837); |
| | | BRD3(8019); FLJ20433(54932); NET1(10276); C10orf130(387707); |
| | | HIF1AN(55662); MTG1(92170); ADARB2(105); NRP1(8829); |
| | | C10orf72(196740); C10orf54(64115); SPOCK2(9806); C10orf83(118812); |
| | | HPS1(3257); COX15(1355); SEC31L2(25956); NRAP(4892); |
| | | ADAM12(8038); SYT8(90019); TXNDC14(51075); MRPL49(740); |
| | | CCND1(595); TAGLN(6876); ABCG4(64137); C10orf44(283171); |
| | | CD59(966); C11orf55(399879); LRRC32(2615); RAB30(27314); |
| | | JOSD3(79101); APOA5(116519); SCN4B(6330); FKBP4(2288); |
| | | LRRC23(10233); MDM2(4193); GLIPR1(11010); TMTC3(160418); |
| | | RPH3A(22895); TMEM132B(114795); C12orf4(57102); PPP1R1A(5502); |
| | | GLS2(27165); ZBTB39(9880); TMCC3(57458); SLC24A6(80024); |
| | | EPIM(2054); FLJ30707(220108); NDFIP2(54602); LOC283487(283487); |
| | | BCL2L2(599); SSTR1(6751); GNG2(54331); C14orf132(56967); |
| | | KIAA0125(9834); TM9SF1(10548); NOVA1(4857); EXOC5(10640); |
| | | WDR22(8816); GPR132(29933); PML(5371); SH3PX3(257364); |
| | | KIAA1199(57214); SCAND2(54581); FLJ43339(388115); C15orf15(51187); |
| | | MPG(4350); KIAA1924(197335); TBL3(10607); NUBP1(4682); |
| | | NFATC2IP(84901); CBFB(865); KIAA0513(9764); C16orf63(123811); |
| | | CHST6(4166); KIAA0523(23302); KSR1(8844); CNP(1267); |
| | | NXPH3(11248); ABCC3(8714); SLC26A11(284129); METT10D(79066); |
| | | CARKL(23729); TAX1BP3(30851); UNQ5783(388325); |
| | | RAD51L3(5892); ERN1(2081); RECQL5(9400); MXRA7(439921); |
| | | FLJ45079(400624); PCYT2(5833); RAB12(201475); KIAA1772(80000); |
| | | TNFRSF11A(8792); PGPEP1(54858); ZNF493(284443); ZNF526(116115); |
| | | C19orf22(91300); ELAVL1(1994); EMR3(84658); GMIP(51291); |
| | | ZNF607(84775); ZNF28(7576); ZNF468(90333); TP53INP2(58476); |
| | | SLC2A10(81031); VAPB(9217); FKBP1A(2280); GGTL3(2686); |
| | | PTPRT(11122); PTGIS(5740); CHRNA4(1137); KIAA0179(23076); |
| | | DKFZp434K191(29797); ASPHD2(57168); MCM5(4174); |
| | | RASD2(23551); GGA1(26088); PPARA(5465); ARVCF(421); |
| | | MAPK1(5594); FLJ90680(400926); C22orf5(25829); NONO(4841); |
| | | TAF1(6872); FGD1(2245); RNF12(51132); |
| hsa-miR-345 | 33; | KIF1B(23095); KLHDC7A(127707); CCDC21(64793); KIAA1522(57648); |
| | | ERMAP(114625); FNBP1L(54874); SLC6A17(388662); QSCN6(5768); |
| | | PFKFB2(5208); C1orf69(200205); HSPB7(27129); RAB3B(5865); |
| | | C1orf180(439927); GBA(2629); GPATC4(54865); ISG2OL2(81875); |
| | | BRP44(25874); WNT9A(7483); PCNXL2(80003); PLD5(200150); |
| | | CRIM1(51232); BRRN1(23397); HDAC4(9759); HDLBP(3069); |
| | | NR2C2(7182); NKTR(4820); LIMD1(8994); ARIH2(10425); |
| | | TBC1D5(9779); THRB(7068); KIAA1143(57456); FYCO1(79443); |
| | | CLDND1(56650); MGLL(11343); LRRC15(131578); STX18(53407); |
| | | MAP2K1IP1(8649); MARCH6(10299); ITGA1(3672); FLJ13611( |

TABLE 4-30

| | | |
|---|---|---|
| | | 80006); CAST(831); SGCD(6444); SLC6A3(6531); PRLR(5618); |
| | | CSF1R(1436); GABRB2(2561); ZNF187(7741); BACH2(60468); |
| | | RABGEF1(27342); RBM33(155435); TRIAD3(54476); IGFBP3(3486); |
| | | LOC401357(401357); ZNF425(155054); DLGAP2(9228); EXTL3(2137); |
| | | PAG1(55824); MMP16(4325); RUNX1T1(862); PAPPA(5069); |
| | | CRB2(286204); C90rf28(89853); TOR1B(27348); C9orf58(83543); |
| | | TRIM14(9830); TSC1(7248); ZNF37A(7587); HTRA1(5654); |
| | | NUDT5(11164); GLUD1(2746); COX15(1355); MGC35295(219995); |
| | | CDC42EP2(10435); PHCA(55331); DIXDC1(85458); SPTY2D1(144108); |
| | | CD59(966); HBXAP(51773); ARHGAP20(57569); PRH2(5555); |
| | | RBMS2(5939); OACT5(10162); GNS(2799); SLC6A15(55117); |
| | | C12orf51(283450); RP11-367C11.1(145173); FLJ30707(220108); |
| | | RCOR1(23186); CDC42BPB(9578); BAG5(9529); SNX22(79856); |
| | | INC45A(55898); BMF(90427); TTC23(64927); DCTN5(84516); |
| | | SRCAP(10847); GPR56(9289); ZNF689(115509); CMTM4(146223); |
| | | ZCCHC14(23174); RPA1(6117); SARM1(23098); DBF4B(80174); |
| | | PNPO(55163); CALCOCO2(10241); NXPH3(11248); TMEM49(81671); |
| | | CAMKK1(84254); LIMD2(80774); TBC1D16(125058); SPIRE1(56907); |
| | | GIPC3(126326); ASXL1(171023); CBFA2T2(9139); ADARB1(104); |
| | | BRWD1(54014); PTTG1IP(754); SLC25A18(83733); |
| | | CTB-1048E9.5(402055); SEC14L2(23541); H1FO(3005); |
| | | FLJ27365(400931); hCAP-H2(29781); FLJ21125(79680); |
| | | MAPK1(5594); MLC1(23209); TLR7(51284); FLJ21687(79917); |
| | | DCX(1641); MECP2(4204); MTCP1(4515); |
| hsa-miR-425-5p | 34; 3437; 3438; | DFFB(1677); MAN1C1(57134); RBBP4(5928); RNF11(26994); |
| | 3439; 3440; 522; | VANGL1(81839); S100A7L1(338324); MPZL1(9019); C1orf21(81563); |
| | 1396; 1397; | EDARADD(128178); MTHFR(4524); FOXJ3(22887); SLC35D1(23169); |
| | | PTGER3(5733); GCLM(2730); NBPF11(200030); TPM3(7170); |
| | | KLF11(8462); VRK2(7444); ANTXR1(84168); ZAK(51776); |
| | | RNASEH1(246243); ATP5G3(518); FLJ39502(285025); HDLBP(3069); |
| | | ENDOGL1(9941); DTX3L(151636); SELT(51714); USP13(8975); |
| | | THRB(7068); 1HPK2(51447); LRIG1(26018); AER61(285203); |
| | | FLJ37478(339983); KLF3(51274); CXCL6(6372); AFF1(4299); |
| | | UGT2B15(7366); MARVELD2(153562); SCAMP1(9522); SMAD5(4090); |
| | | PCDHB5(26167); CPLX2(10814); DNAJC18(202052); QKI(9444); |
| | | RP3-398D13.1(285780); TRAM2(9697); STX7(8417); PDE10A(10846); |
| | | ADCY1(107); RBM33(155435); TMED4(222068); PURB(5814); |
| | | PMS2L2(5380); MGC40405(257415); CNOT4(4850);UBE2V2(7336); |
| | | CHRAC1(54108); FUT10(84750); SFRP1(6422); C9orf47(286223); |
| | | FREQ(23413); ABCA1(19); PTEN(5728); DNMT2(1787); |
| | | C10orf72(196740); ANK3(288); C10orf13(143282); SH3PXD2A(9644); |
| | | MLSTD2(84188); SNF1LK2(23235); CBL(867); ARFIP2(23647); |
| | | NRIP3(56675); PGM2L1(283209); HBXAP(51773); CTSC(1075); C12or |

TABLE 4-31

| | | |
|---|---|---|
| | | f32(83695); PEX5(5830); GLI1(2735); ATP6V0A2(23545); |
| | | DUSP16(80824); IGF1(3479); NT5DC3(51559); TMEM132D(121256); |
| | | CLYBL(171425); CHES1(1112); CSNK1G1(53944); FLJ22795(80154); |
| | | CRAMP1L(57585); ABAT(18); LOC63928(63928); ATP2A1(487); |
| | | SPN(6693); NFATC3(4775); BANP(54971); LITAF(9516); LKAP(9665); |
| | | SMG1(23049); USP31(57478); PAFAH1B1(5048); HLF(3131); |
| | | PPM1D(8493); NUFIP2(57532); TCF2(6928); CDC27(996); |
| | | CYB561(1534); RAB31(11031); DOK6(220164); DYM(54808); |
| | | MCEMP1(199675); UPF1(5976); DPY19L3(147991); LOC284296(284296); |
| | | DNAJC5(80331); C20orf42(55612); ZHX3(23051); NCOA5(57727); |
| | | CYYR1(116159); BRWD1(54014); LSS(4047); CBX6(23466); WWC3(55841); |
| | | OPHN1(4983); LAMP2(3920); CUL4B(8450); PRKY(5616); |
| hsa-miR-484 | 35; 523; 524; 525; | C1orf83(127428); CYB561D1(284613); HIPK1(204851); LMNA(4000); |
| | 526; 1398; | UCK2(7371); ADORA1(134); MAPKAPK2(9261); BSDC1(55108); |
| | | KIAA0319L(79932); RIMS3(9783); NBPF11(200030); KIF21B(23046); |
| | | EMX1(2016); FLJ45964(401040); CYS1(192668); KIAA1715(80856); |
| | | HDAC4(9759); DLEC1(9940); ZNF651(92999); SPSB4(92369); |
| | | WFS1(7466); FLJ35725(152992); DCAMKL2(166614); |
| | | LRPAP1(4043); TSPAN17(26262); N4BP3(23138); TPPP(11076); |
| | | ADCY1(107); CLN8(2055); ANK1(286); ZNF37A(7587); RAI17(57178); |
| | | NEURL(9148); ADARB2(105); SPOCK2(9806); SH3PXD2A(9644); |
| | | KCNC1(3746); AMOTL1(154810); DLG2(1740); PPP2R1B(5519); |
| | | RBMS2(5939); TCF1(6927); ANAPC7(51434); CHFR(55743); |
| | | TRAF3(7187); KIAA0284(283638); PACS2(23241); SPTLC2(9517); |
| | | XRCC3(7517); CPLX3(594855); ABHD2(11057); FLJ38723(255180); |
| | | CSNK1G1(53944); RAB40C(57799); SNN(8303); PRRT2(112476); |
| | | HCP1(113235); RAD51L3(5892); MXRA7(439921); RAB8A(4218); |
| | | F2RL3(9002); C20orf91(284800); C20orf11(54994); ZGPAT(84619); |
| | | ProSAPiP1(9762); THBD(7056); GGTL3(2686); RIMS4(140730); |
| | | IFNAR.1(3454); PDXK(8566); C22orf13(83606); MECP2(4204); |
| hsa-miR-485-5p | 36; 3441; 3442; | SAMD11(148398); H6PD(9563); C1orf151(440574); SNX27(81609); |
| | 527; 3443; | LMNA(4000); QSCN6(5768); C1orf95(375057); C1orf69(200205); |
| | | OXCT2(64064); CLCC1(23155); TMEM63A(9725); C1orf55(163859); |
| | | MRPL30(51263); WDR33(55339); LIMD1(8994); HEMK1(51409); |
| | | ARGFX(503582); DTX3L(151636); MFN1(55669); ADIPOQ(9370); |
| | | WHSC1(7468); HD(3064); SH3D19(152503); ARSK(153642); |
| | | WDR55(54853); PCDHB11(56125); N4BP3(23138); F2RL2(2151); |
| | | TTBK1(84630); PAQR8(85315); TAPBP(6892); TREML2(79865); |
| | | TTYH3(80727); FOXK1(221937); BCAP29(55973); LOC401357(401357); |
| | | MGC14289(92092); PDLIM2(64236); CA13(377677); ATP6V0D2(245972); |
| | | ZFP41(286128); TNFRSF10B(8795); ST3GAL1(6482); |
| | | C9orf47(286223); OLFML2A(169611); KCNT1(57582); UAP1L1(91373); |
| | | SEMA4D(10507); AKNA(80709); FBXW2(26190); CHST |

TABLE 4-32

| | | |
|---|---|---|
| | | 3(9469); TSPAN14(81619); PAPD1(55149); C10orf76(79591); |
| | | FAM53B(9679); LRRC51(220074); LIN7C(55327); ZBTB3(79842); |
| | | SPTBN2(6712); FZD4(8322); SCN3B(55800); HOXC12(3228); |
| | | RBMS2(5939); MDM2(4193); KCNMB4(27345); APAF1(317); |
| | | KIAA1853(84530); CDCA3(83461); CBX5(23468); NT5DC3(51559); |
| | | FLJ40296(122183); KNS2(3831); GNPNAT1(64841); SPTB(6710); |
| | | KLF13(51621); CHP(11261); EIF3S1(8669); RAB8B(51762); CYP1A2(1544); |
| | | SCAND2(54581); FLJ22795(80154); AP3S2(10239); RAB40C(57799); |
| | | KIAA1924(197335); PAQR4(124222); CIITA(4261); PLK1(5347); |
| | | SPN(6693); CCL22(6367); PDPR(55066); DDX19B(11269); |
| | | KIAA0513(9764); MGC13114(84326); MEFV(4210); FLJ45256(400511); |
| | | EXOSC6(118460); SARM1(23098); MAPT(4137); PNPO(55163); |
| | | MSI2(124540); ABR(29); TOM1L2(146691); LOC201181(201181); |
| | | LOC162427(162427); MEOX1(4222); TMEM101(84336); GJA7(10052); |
| | | SUMO2(6613); TMC6(11322); TNFSF9(8744); UBA52(7311); |
| | | PVR(5817); APOE(348); CD3EAP(10849); HIF3A(64344); RPL28(6158); |
| | | ZNF264(9422); LOC390980(390980); FLJ45445(399844); |
| | | ADAMTSL5(339366); MOBKL2A(126308); TIMM13(26517);RANBP3(8498); |
| | | RAB3D(9545); ZNF490(57474); SF4(57794); RHPN2(85415); |
| | | CARD8(22900); LOC352909(352909); A1BG(1); ZNF497(162968); |
| | | SNPH(9751); ATRN(8455); TGIF2(60436); LPIN3(64900); |
| | | RAB22A(57403); OSBPL2(9885); C20orf59(63910); RP5-1054A22.3(85449); |
| | | PTGIS(5740); PDXK(8566); DSCR3(10311); LOC400891(400891); |
| | | PPIL2(23759); NF2(4771); LOC63929(63929); PPARA(5465); |
| | | LOC388886(388886); SHOX(6473); PDHA1(5160); TRAPPC2(6399); |
| | | MCART6(401612); |
| hsa-miR-486 | 37; 528; 3444; | VANGL1(81839); ATPAF1(64756); CTSK(1513); SUSD4(55061); |
| | | CNNM4(26504); FLJ16008(339761); PGAP1(80055); NR2C2(7182); |
| | | MAGI1(9223); CCDC14(64770); DNAJC19(131118); EHHADH(1962); |
| | | WHSC1(7468); GNRHR(2798); LOC152485(152485); LOC493869(493869); |
| | | POLR1C(9533); KIAA1919(91749); C6orf62(81688); |
| | | MDGA1(266727); PHF10(55274); ZNRF2(223082); LMTK2(22853); |
| | | SERPINE1(5054); MELN1(4289); NSUN5C(260294); LRRC4(64101); |
| | | ZC3HAV1(56829); NUDCD1(84955); KCNQ3(3786); C9orf47(286223); |
| | | KLHL9(55958); APBA1(320); C9orf77(51104); FANCC(2176); |
| | | ZNF37A(7587); PTEN(5728); PCGF5(84333); BTAF1(9044); |
| | | MKI67(4288); TNFRSF19L(84957); ST5(6764); PPP1CA(5499); |
| | | IGSF4(23705); PDE3A(5139); FOXO1A(2308); RASA3(22821); |
| | | FLRT2(23768); TRAPPC6B(122553); BAG5(9529); EIF3S1(8669); |
| | | Gcom1(145781); SNX22(79856); CNTNAP4(85445); C16orf5(29965); |
| | | SMG6(23293); METT10D(79066); SREBF1(6720); RAB12(201475); |
| | | ANKRD12(23253); CEP192(55125); NFATC1(4772); KLK2(3817); |
| | | ZNP331(55422); LRRC25(126364); ZNF418(147686); STK4(6789); |

TABLE 4-33

| | | |
|---|---|---|
| | | TXNDC13(56255); RBM12(10137); SON(6651); BRWD1(54014); |
| | | NUDT11(55190); |
| hsa-miR-488 | 38; 3445; | C1orf130(400746); FAM46C(54855); KIAA0319L(79932); C1orf163(65260); |
| | | RBMXL1(494115); DBT(1629); ZNF512(84450); ANKRD36(375248); |
| | | CDCA7(83879); YWHAQ(10971); WDR33(55339); MOBP(4336); |
| | | GPR62(118442); THRB(7068); KIAA1143(57456); AER61(285203); |
| | | VGLL3(389136); LRRC15(131578); MOBKL1A(92597); RPL34(6164); |
| | | USP46(64854); CPEB4(80315); SPOCK1(6695); CD83(9308); C2(717); |
| | | RNF8(9025); SLC35A1(10559); GPR126(57211); ESR1(2099); |
| | | DSCR1L1(10231); CNR1(1268); CHN2(1124); DKFZp761I2123(83637); |
| | | ZNF398(57541); DRCTNNB1A(84668); IGF2BP3(10643); CHMP7(91782); |
| | | ESCO2(157570); ZHX2(22882); RDHE2(195814); PAG1(55824); |
| | | MGC21881(389741); NTRK2(4915); FCMD(2218); LOC389791(389791); |
| | | PPP3R2(5535); CASP7(840); GPR26(2849); GPAM(57678); STX3A(6809); |
| | | DIXDC1(85458); ARHGEF12(23365); SLC1A2(6506); CLEC2D(29121); |
| | | FGD4(121512); BRI3BP(140707); LOC144501(144501); NRXN3(9369); |
| | | FLJ11806(79882); C14orf143(90141); PLEKHQ1(80301); MTFMT(123263); |
| | | PRKCB1(5579); CYB5B(80777); ARL6IP(23204); BIRC4BP(54739); |
| | | WSB1(26118); NF1(4763); KCNJ2(3759); TBC1D3C(414060); |
| | | USP36(57602); RIOK3(8780); SETBP1(26040); TKNDC10(54495); |
| | | LOC284434(284434); CEBPG(1054); FLJ40235(284369); C19orf31(404664); |
| | | ZNF562(54811); NCOA3(8202); ARFGEF2(10564); ETS2(2114); |
| | | LOC400927(400927); CBX7(23492); CLCN4(1183); AFF2(2334); |
| | | ARHGAP6(395); RPGR(6103); ZNF75(7626); |
| hsa-miR-510 | 39; | C1orf95(375057); KIAA0319L(79932); TMEM127(55654); FLJ43879(401039); |
| | | ZNF651(92999); TREX1(11277); UTP15(84135); KIAA1961(96459); |
| | | SLC22A7(10864); ANKRD6(22881); PHACTR2(9749); HLA-DOA(3111); |
| | | SLC7A2(6542); PAG1(55824); NTRK2(4915); C9orf47(286223); |
| | | GPR107(57720); SCD(6319); MTG1(92170); DUSP8(1850); APOLD1(81575); |
| | | AQP2(359); RNF41(10193); ZNF605(90462); TRAF3(7187); NEK9(91754); |
| | | C14orf143(90141); KIAA1794(55215); GRIN2A(2903); CD2BP2(10421); |
| | | PPM1D(8493); ACOX1(51); RAB12(201475); OR7D2(162998); APOE(348); |
| | | ZFPL(162967); GGTL3(2686); PTGIS(5740); POLR3H(171568); |
| | | FLJ41993(400935); RBM5(5935); A1BG(1); ABO(28); AP2B1(163); |
| | | ARHGAP1(392); BCKDHB(594); BNIP2(663); CAPN5(726); CBL(867); |
| | | CHES1(1112); CRX(1406); CYP11B1(1584); DHX8(1659); DHCR24(1718); |
| | | E2F2(1870); EGFR(1956); SERPINB1(1992); SLC29A1.(2030); |
| | | FANCD2(2177); MLANA(2315); FUT1(2523); GM2A(2760); GNS(2799); |
| | | HEXA(3073); HIP1(3092); HOXA11(3207); IDE(3416); IL16(3603); |
| | | TNFRSF9(3604); KCNA7(3743); KLK2(3817); LLGL2(3993); |
| | | LMNA(4000); MXD1(4084); MAF(4094); MAX(4149); MBP(4155); MCM |

TABLE 4-34

| | | |
|---|---|---|
| | | 5(4174); MKLN1(4289); NEDD9(4739); NF2(4771); OPHN1(4983); |
| | | PAK2(5062); PCYT1A(5130); PDE2A(5138); PGM3(5238); |
| | | PITPNA(5306); PKNOX1(5316); PLOD1(5351); PML(5371); |
| | | PPP2R5E(5529); PSEN1(5663); PTGDS(5730); RANGAP1(5905); |
| | | RBBP4(5928); RPL13(6137); RPS15A(6210); RXRA(6256); |
| | | SHOX(6473); SLC2A4(6517); |
| hsa-miR-515-3p | 40; 1399; 1400; | RHD(6007); MMACHC(25974); ABCD3(5825); CYB561D1(284613); |
| | | ATP1A2(477); SDC3(9672); PRNPIP(79033); DHCR24(1718); |
| | | C1orf183(55924); PIK4CB(5298); SI00A16(140576); GATAD2B(57459); |
| | | TNFSF4(7292); ENAH(55740); ACBD3(64746); SH3BP5L(80851); |
| | | ZNF2(7549); MGC5509(79074); MGC52057(130574); ZAK(51776); |
| | | ANKZF1(55139); COL4A3(1285); ZNF513(130557); BCL11A(53335); |
| | | TMEM127(55654); CACNB4(785); GPR155(151556); IL8RA(3577); |
| | | ATXN7(6314); COL8A1(1295); PLD1(5337); ALG3(10195); |
| | | MGC4618(84286); TEC(7006); USP46(64854); CLOCK(9575); |
| | | PCDHB9(56127); ARHGAP26(23092); PRLR(5618); ARSB(411); |
| | | AFF4(27125); APBB3(10307); FAT2(2196); HK3(3101); HIST1H2AC(8334); |
| | | SCUBE3(222663); MYO6(4646); RP5-875H10.1(389432); |
| | | QKI(9444); DKFZp779B1540(389384); DJ122O8.2(57226); |
| | | EPHA7(2045); SYNE1(23345); ADCY1(107); ZKSCAN1(7586); |
| | | PRKRIP1(79706); CHRM2(1129); DKFZP434B0335(25851); C8orf48(157773); |
| | | TRIM55(84675); PI15(51050); C8orf30A(51236); FGFR1(2260); |
| | | PAG1(55824); RBM12B(389677); TP53INP1(94241); LYNX1(66004); |
| | | ANKRD20A3(441425); SLC31A2(1318); GABBR2(9568); MGC14327(94107); |
| | | LOC399706(399706); MYO3A(53904); C10orf39(282973); |
| | | CXCL12(6387); C10orf25(220979); MARCH8(220972); MKI67(4288); |
| | | LRRC55(219527); FLJ13848(79829); PCF11(51585); LOC399947(399947); |
| | | TAGLN(6876); ARCN1(372); STS-1(84959); C1orf55(399879); |
| | | GPR44(11251); RAB30(27314); SIAE(54414); CDON(50937); |
| | | LOC283174(283174); FLJ20489(55652); METTL7B(196410); |
| | | DYRK2(8445); NUDT4(11163); TMEM132B(114795); FMNL3(91010); |
| | | MMP19(4327); GLS2(27166); B4GALNT1(2583); CTDSP2(10106); |
| | | PTPRB(5787); SLC6A15(55117); SLC24A6(80024); |
| | | FBXO21(23014); SPATA13(221178); TMEM46(387914); C13orf1(57213); |
| | | AKAP6(9472); RGS6(9628); ZADH1(145482); AP1G2(8906); |
| | | JPH4(84502); ACTN1(87); WDR22(8816); ZDHHC22(283576); |
| | | BCL11B(64919); KLF13(51621); SORD(6652); TLN2(83660); |
| | | CSNK1G1(53944); SNN(8303); MKL2(57496); MMP15(4324); |
| | | ZNRF1(84937); GARNL4(23108); ZFP3(124961); TRAF4(9618); |
| | | ABCC3(8714); BAIAP2(10458); RTN4RL1(146760); MED31(51003); |
| | | LIMD2(80774); CASKIN2(57513); TK1(7083); PCYT2(5833); |
| | | C18orf25(147339); ZNF24(7572); MBD1(4152); P2RY11(5032); |
| | | IXL(55588); AXL(558); ADAMTSL5(339366); MKNK2(2872); |
| | | DPP9(91039); RANB |

TABLE 4-35

| | | |
|---|---|---|
| | | P3(8498); SLC25A28(79085); BRD4(23476); RASSF2(9770); |
| | | DIDO1(11083); ABCC13(150000); DYRK1A(1859); APOL6(80830); |
| | | DGCR14(8220); MAPK1(5594); ZNF81(347344); YIPF6(286451); |
| | | HMGB3(3149); ZNF185(7739); P2RY8(286530); CXorf23(256643); |
| | | SMC1L1(8243); RP11-308B5.5(159090); RAB39B(116442); |
| hsa-miR-515-5p | 41; 1401; | IGSF4B(57863); QSCN6(5768); C1orf21(81563); NAVI(89796); |
| | | WASF2(10163); NOTCH2(4853); MEF2D(4209); ITPKB(3707); |
| | | TAF5L(27097); FOSL2(2355); MRPL30(51263); EPB41L5(57669); |
| | | WDR75(84128); TGFBR2(7048); RAP2B(5912); WHSC1(7468); |
| | | FAM105B(90268); GRIA1(2890); AFF4(27125); FLJ14166(79616); |
| | | QKI(9444); ZNF92(168374); LOC441257(441257); ZNF680(340252); |
| | | YWHAG(7532); SEMA3E(9723); GIMAP6(474344); TSC1(7248); |
| | | WDR37(22884); KCNMA1(3778); TMEM10(93377); FGFR2(2263); |
| | | KIAA0652(9776); STS-1(84959); RAB30(27314); ZF(58487); |
| | | FOXJ2(55810); YAF2(10138); HS6ST3(266722); KIAA0328(23351); |
| | | KIAA0247(9766); CHES1(1112); IL16(3603); C15orf17(57184); |
| | | BOLA2(552900); ARHGEF15(22899); KIAA1772(80000); ZNF28(7576); |
| | | PLCG1(5335); ZGPAT(84619); NF2(4771); APOL6(80830); |
| | | MAPK1(5594); CXorf39(139231); ATP1B4(23439); P2RY8(286580); |
| hsa-miR-517* | 42; | PRAMEF9(343070); SESN2(83667); EPB41(2035); PIAS3(10401); |
| | | SNX27(81609); QSCN6(5768); C1orf21(81563); FLJ39739(388685); |
| | | NMNAT2(23057); FLJ40869(348654); CAD(790); MRPL35(51318); |
| | | RBJ(51277); LHCGR(3973); REEP1(65055); FLJ40629(150468); |
| | | WDR33(55339); RND3(390); ERBB4(2066); CUL3(8452); FLJ20701(55022); |
| | | LIMD1(8994); ACPP(55); CCDC52(152185); SLA/LP(51091); OTUD4(54726); |
| | | IL7R(3575); ARSK(153642); SLC26A2(1836); MFAP3(4238); IL6ST(3572); |
| | | PDE4D(5144); FAT2(2196); ADAMTS2(9509); MANEA(79694); QRSL1(55278); |
| | | PHIP(55023); FOXK1(221937); FLJ10099(55069); ADAM22(53616); |
| | | STEAP2(261729); PRKAR2B(5577); CALN1(83698); HIP1(3092); CDK6(1021); |
| | | MTMR9(66036); RHOBTB2(23221); MTDH(92140); NUDCD1(84955); |
| | | TRPS1(7227); GCNT1(2650); PAPPA(5069); GTF3C4(9329); |
| | | PLAA(9373); CUGBP2(10659); ADARB2(105); KCNMA1(3778); |
| | | OR51E1(143503); LRRC55(219527); TIGD3(220359); CCDC15(80071); |
| | | CHKA(1119); KCTD14(65987); PHC1(1911); RBMS2(5939); SOCS2(8835); |
| | | OAS2(4939); FLJ10292(55110); SLC38A1(81539); C12orf51(283450); |
| | | CAMKK2(10645); ATP8A2(51761); LCP1(3936); BCL2L2(599); |
| | | RAD51L1(5890); NRXN3(9369); TRIM9(114088); KIAA0831(22863); |
| | | ARIH1(25820); MYO5A(4644); SELS(55829); CRAMP1L(57585); |
| | | EMP2(2013); ZNF694(342357); RABEP1(9135); TMEM97(27346); |
| | | UNC45B(146862); IGF2BP1(10642); SLC9A3R1(9368); MXRA7(439921); |
| | | C18orf45(85019); AXL(558); MARK4(57787); ZNF264(9422); |
| | | ZNF304(57343); TNPO2(30000); BRD4(23476); FUT1( |

TABLE 4-36

| | | |
|---|---|---|
| | | 2523); LAIR1(3903); SDC4(6385); ABCC13(150000); AGPAT3(56894); |
| | | KIAA0376(23884); L3MBTL2(83746); YPEL1(29799); CA5B(11238); |
| | | EDA(1896); KLHL4(56062); CXorf39(139231); OCRL(4952); |
| | | DDX26B(203522); SPRY3(10251); IL9R(3581); LAMP2(3920); |
| | | MECP2(4204); |
| hsa-miR-520d | 43; 3446; 529; 530; | FBLIM1(54751); MANEAL(149175); PRPF38A(84950); ZYG11B(79699); |
| | 3447; 531; 1402; | HS2ST1(9653); TXNIP(10628); UHMK1(127933); IPO9(55705); |
| | 1403; 1404; 1405; | FLVCR(28982); C1orf69(200205); TRIM58(25893); DFFA(1676); |
| | 1406; 1407; 1408; | FUSIP1(10772); TTMB(399474); CTSS(1520); ISG20L2(81875); |
| | 1409; 1410; 1411; | ZBTB41(360023); FMOD(2331); RIPK5(25778); YOD1(55432); |
| | 1412; 1413; 1414; | PGBD5(79605); DPYSL5(56896); CYBRD1(79901); ASB1(51665); |
| | 1415; 1416; 1417; | FLJ14397(84865); RNF149(284996); PAX8(7849); GALNT3(2591); |
| | 1418; 1419; 1420; | GPR155(151556); NR2C2(7182); GALNTL2(117248); TGFBR2(7048); |
| | 1421; 1422; 1423; | IGSF4D(253559); SEC22L3(9117); FYCO1(79443); LRRC2(79442); |
| | 1424; 1425; 1426; | MGC40579(256356); THAP6(152815); PDLIM5(10611); ANK2(287); |
| | 1427; 1428; 1429; | SLC7A11(23657); LOC152485(152485); KIAA1909(153478); |
| | 1430; 1431; 1432; | SERF1A(8293); UBE2B(7320); ERGIC1(57222); SEMA5A(9037); |
| | 1433; 1434; 1435; | FLJ25680(134187); DTWD2(285605); IRF1(3659); C6orf69(222658); |
| | 1436; 1437; 1438; | NUDT3(11165); ITGB8(3696); EGFR(1956); VKORC1L1(154807); |
| | 1439; 1440; 1441; | CROT(54677); DKFZP686A10121(85865); GATAD1(57798); |
| | 1442; 1443; 1444; | ZKSCAN1(7586); CYCS(54205); TMED4(222068); HIP1(3092); |
| | 1445; 1446; 1447; | RABL5(64792); NAPE-PLD(222236); LOC168850(168850); |
| | 1448; 1449; 1450; | KIAA1456(57604); PIWIL2(55124); PSD3(23362); RAB11FIP1(80223); |
| | 1451; 1452; 1453; | FGFR1(2260); PAG1(55824); TRPS1(7227); C9orf47(286223); |
| | 1454; | GLIS3(169792); GTPBP4(23560); DHTKD1(55526); SUV39H2(79723); |
| | | PCGF5(84333); ENTPD7(57089); FRMD4A(55691); POLR3A(11128); |
| | | FAM26C(255022); hfl-B5(10480); PRRG4(79056); KIAA1377(57562); |
| | | C11orf1(64776); SUV420H1(51111); HBXAP(51773); FGD4(121512); |
| | | GDF11(10220); ERBB3(2065); GTF2H3(2967); FKBP11(51303); |
| | | FMNL3(91010); NFYB(4801); FLJ25477(219287); GPR12(2835); |
| | | RNF31(55072); CHURC1(91612); C14orf153(84334); |
| | | METTL3(56339); SPTLC2(9517); CATSPER2(117155); C15orf38(348110); |
| | | NFATC2IP(84901); SPN(6693); MARVELD3(91862); LOC654780(654780); |
| | | WIRE(147179); DHX8(1659); PNPO(55163); PRR11(55771); |
| | | SSTR2(6752); GJA7(10052); SLC14A1(6563); TNFAIP8L1(126282); |
| | | SPIB(6689); ZNF264(9422); EMR2(30817); SLC35E1(79939); |
| | | KIAA1559(57677); OPA3(80207); ZFPL(162967); POFUT1(23509); |
| | | C20orf121(79183); RAB22A(57403); FLJ333860(284756); |
| | | BRWD1(54014); TNRC6B(23112); LOC63929(63929); PPARA(5465); |
| | | MAPK1(5594); AFF2(2334); |

| | | |
|---|---|---|
| hsa-miR-520f | 44; 532; 1455; 1456; | KIAA1522(57648); RAVER2(55225); PTGFR(5737); LMO4(8543); |
| | | PKN2(5586); FAM102B(284611); GPR61(83873); LOC388692(388692); |
| | | PEA15(8682); PRRX1(5396); RASAL2(9462); RALGPS2(551 |

TABLE 4-37
03); CACNA1E(777); RGL1(23179); SYT14(255928);
CENPF(1063); C1orf69(200205); KIAA0319L(79932);
JAK1(3716); SSX2IP(117178); OLFM3(118427);
MCL1(4170); CTSS(1520); ANKRD45(339416);
RC3H1(149041); KIAA0040(9674); APOBEC4(403314);
ZBTB41(360023); WDR26(80232); ITPKB(3707);
ARID4B(51742); SELI(85465); PLB1(151056);
ZNF2(7549); EPB41L5(57669); CYBRD1(79901);
ZAK(51776); CDCA7(83879); FLJ38973(205327);
BMPR2(659); OACT2(129642); ROCK2(9475);
RBJ(51277); STRN(6801); CYP26B1(56603);
LRRTM4(80059); FLJ10996(54520); ORC4L(5000);
FIGN(55137); GALNT3(2591); ATF2(1386);
FEJ13946(92104); EDEM1(9695); ZNF651(92999);
C3orf23(285343); IL17RB(55540); ZNF654(55279);
SLC25A36(55186); MME(4311); TP73L(8626);
ATP2B2(491); IQSEC1(9922); FYCO1(79443);
VPRBP(9730); ARHGEF3(50650); CNTN3(5067);
VGLL3(389136); PCGF3(10336); TMPRSS11E(28983);
FRAS1(80144); ANK2(287); FGF2(2247);
SCARB2(950); LOC90355(90355); MFAP3(4238);
SGCD(6444); CNOT6(57472); SEMA5A(9037);
RICTOR(253260); FLJ44796(401209);
SPARC(6678); AOF1(221656); MICA(4276);
NFYA(4800); LOC221442(221442); ACY1L2(135293);
MANEA(79694); TCF21(6943); STX11(8676);
DODC2(51473); CREBL1(1388); RXRB(6257);
COL9A1(1297); DJ122O8.2(57226); CREB5(9586);
EGFR(1956); CROT(54677); ZKSCAN1(7586);
LSM8(51691); FAM40B(57464); LUC7L2(51631);
CNTNAP2(26047); PAPOLB(56903); TMED4(222068);
HIP1(3092); MCFP(55972); NAPE-PLD(222236);
FLJ31818(154743); KIAA1456(57604);
UNC5D(137970); SPFH2(11160); TACC1(6867);
YTHDF3(253943); PKIA(5569); GRHL2(79977);
MTUS1(57509); PLAG1(5324); PAG1(55824);
REXO1L1(254958); RBM12B(389677);
LRRC6(23639); C9orf47(286223);
OLFML2A(169611); ODF2(4957); GLIS3(169792);
C9orf72(203228); MCART1(92014);SPTLC1(10558);
TRIM14(9830); GRIN3A(116443); RBM18(92400);
TSC1(7248); CAMSAP1(157922); WDR37(22884);
CUGBP2(10659);HSPA14(51182); MRC1L1(414308);
GPR158(57512); ZNF488(118738); NUDT13(25961);
SFTPA1(6435); KIAA1128(54462); MLR2(84458);
ACADSB(36); FRMD4A(55691); AP3M1(26985);
KCNMA1(3778); OVOL1(5017); THRSP(7069);
PANX1(24145); MLL(4297); SC5DL(6309);
STS-1(84959); FBXO3(26273); TRAF6(7189);
ZNF289(84364); GPR44(11251); RELA(5970);
SUV420H1(51111); HBXAP(51773); GAB2(9846);
MAML2(84441); OPCML(4978); CCND2(894);
AEBP2(121536); MSRB3(253827); RIC8B(55188);
P2RX4(5025); RAD52(5893); C12orf4(57102);
LMO3(55885); SOX5(6660); TMTC1(83857);
MGC24039(160518); SENP1(29843); GNS(2799);
OSBPL8(114882); ZNF605(90462); FLJ30707(220108);
ARHGEF7(8874); FLJ25477(219287); DCAMKL1(9201);
C14orf101(54916); ARID4

TABLE 4-38

| | | |
|---|---|---|
| | | A(5926); EIF2S1(1965); KIAA0247(9766); PSEN1(5663); TTC5(91875); |
| | | NOVA1(4857); CFL2(1073); NIN(51199); ATXN3(4287); ITPK1(3705); |
| | | SERPINA10(51156); SPRED1(161742); EIF3S1(8669); IL16(3603); |
| | | ABHD2(11057); TP53BP1(7158); CA12(771); PUNC(9543); FLJ22795(80154); |
| | | C15orf38(348110); MKL2(57496); HS3ST4(9951); TNT(162083); |
| | | RPL13(6137); XYLT1(64131); VPS35(55737); CMTM4(146223); Pfs2(51659); |
| | | TNFAIP1(7126); ANKRD13B(124930); GOSR2(9570); CLEC10A(10462); |
| | | MYOHD1(80179); C17orf73(55018); LIMD2(80774); RNF157(114804); |
| | | C18orf1(753); MIB1(57534); LAMA3(3909); TNFRSF11A(8792); MBP(4155); |
| | | APOE(348); RPL13A(23521); ZNF473(25888); FLJ38288(284309); |
| | | ADAMTSL5(339366); PTPNS1(140885); C20orf7(79133); MMP24(10893); |
| | | STK4(6789); TUBB1(81027); KCNB1(3745); SLC5A3(6526); BAGE4(85317); |
| | | ADAMTS5(11096); BRWD1(54014); PLAC4(191585); TSSK2(23617); |
| | | MTMR3(8897); KDELR3(11015); TNRC6B(23112); LOC91689(91689); |
| | | PPARA(5465); CECR1(51816); MAPK1(5594); LIF(3976); RBM9(23543); |
| | | LDOC1L(84247); OATL1(4943); DIAPH2(1730); OCRL(4952); ATP2B3(492); |
| | | LDOC1(23641); |
| hsa-miR-520h | 45; 3448; 533; | PRKAA2(5563); TMEM56(148534); IPO9(55705); FLVCR(28982); DFFA(1676); |
| | 1457; | FBXO42(54455); IPP(3652); ATPAF1(64756); C1orf163(65260); DBT(1629); |
| | | C1orf183(55924); PRKAB2(5565); CTSS(1520); ISG20L2(81875); |
| | | KCNJ10(3766); CD84(8832); TAF5L(27097); LIMS1(3987); CFLAR(8837); |
| | | CYP20A1(57404); FLJ14397(84865); MGAT4A(11320); RNF149(284996); |
| | | RGPD5(84220); PAX8(7849); GPR155(151556); OGG1(4968); CDGAP(57514); |
| | | ZFYVE20(64145); SEC22L3(9117); KIAA1143(57456); PRKAR2A(5576); |
| | | DCBLD2(131566); MGC40579(256356); PFN2(5217); THAP6(152815); |
| | | GABRG1(2565); BDH2(56898); SLC7A11(23657); G3BP1(10146); |
| | | SEMA5A(9037); FLJ25680(134187); IRF1(3659); DNAJC18(202052); |
| | | SPRY4(81848); C6orf69(222658); LIN28B(389421); C6orf71(389434); |
| | | ATXN1(6310); NUDT3(11165); DJ122O8.2(57226); SERINC1(57515); |
| | | STX7(8417); GATAD1(57798); ZKSCAN1(7586); TMED4(222068); |
| | | RABL5(64792); FLJ13576(64418); MTMR9(66036); KIAA1456(57604); |
| | | PIWIL2(55124); SPFH2(11160); RAB11FIP1(80223); MGC21881(389741); |
| | | NTRK2(4915); C9orf47(286223); ZNF483(158399); SLC31A1(1317); |
| | | FREQ(23413); DHTKD1(55526); ENTPD7(57089); INPP5F(22876); |
| | | LRRC27(80313); C10orf72(196740); DKFZp686O24166(374383); |
| | | FLJ13848(79829); KIAA1377(57562); C11orf1(64776); SHANK2(22941); |
| | | DNM1L(10059); IRAK4(51135); FLJ13236(79962); TBC1D15(64786); |
| | | GTF2H3(2967); SLC2A3(6515); CBX5(23468); MRP63(78988); RFP2(10206); |
| | | EFNB2(1948); C14orf111(51077); FLRT2(23768); C14orf153(84334); |
| | | SPTLC2(9517); ABHD2(11057); TNRC6A(27327); SPN(6693); CYB5B(80777); |

TABLE 4-39

| | | |
|---|---|---|
| | | MARVELD3(91862); MON1B(22879); NEK8(284086); NKIRAS2(28511); |
| | | FLJ35848(284071); PNPO(55163); PRR11(55771); SSTR2(6752); |
| | | NUFIP2(57532); GJA7(10052); GRB2(2885); ACOX1(51); DYM(54808); |
| | | TNFAIP8L1(126282); PDE4A(5141); LDLR(3949); SIN3B(23309); |
| | | F2RL3(9002); SPIB(6689); KIAA1559(57677); OPA3(80207); |
| | | ZFPL(162967); ZNF667(63934); C20orf121(79183); IFNAR1(3454); |
| | | ADAMTS5(11096); BRWD1(54014); TNRC6B(23112); LOC63929(63929); |
| | | PPARA(5465); YPEL1(29799); MAPK1(5594); NPTXR(23467); |
| | | CERK(64781); PRKX(5613); CXorf38(159013); RP13-383K5.1(55285); |
| | | LAMP2(3920); |
| hsa-miR-522 | 46; 534; 1458; | DSCR1L2(11123); RHD(6007); C1orf83(127428); RAVER2(55225); |
| | | RNF2(6045); C1orf107(27042); MTR(4548); ARHGAP29(9411); |
| | | ABI2(10152); WDR33(55339); HDAC4(9759); PIK3CA(5290); |
| | | CENTB2(23527); WHSC1(7468); NUP54(53371); GM2A(2760); |
| | | LSM11(134353); PRKAA1(5562); HSA9761(27292); P18SRP(285672); |
| | | MEF2C(4208); FLJ25680(134187); FEM1C(56929); PHACTR2(9749); |
| | | PLEKHG1(57480); MTDH(92140); PSD3(23362); ENTPD4(9583); |
| | | WHSC1L1(54904); C9orf47(286223); RBM18(92400); CUGBP2(10659); |
| | | NRG3(10718); KIAA1128(54462); ENTPD7(57089); ZFP91(80829); |
| | | SC5DL(6309); LOC196463(196463); WBP11(51729); PUS7L(83448); |
| | | FMNL3(91010); KITLG(4254); KL(9365); EXOSC8(11340); |
| | | KCTD12(115207); ARHGAP5(394); C15orf38(348110); RABEP1(9135); |
| | | PPM1E(22843); PRKCA(5578); VAPA(9218); RPL28(6158); |
| | | ELAVL1(1994); CARD8(22900); STK4(6789); DYRK1A(1859); |
| | | DIP2A(23181); DSCR3(10311); BRWD1(54014); PPARA(5465); |
| | | SPRY3(10251); FAM9C(171484); |
| hsa-miR- | 47; 1459; | TEC(7006); C8orf30A(51236); TOLLIP(54472); LRRC23(10233); |
| 525* | | TRAF7(84231); RANBP10(57610); IGF2BP1(10642); SCDR10(374875); |
| | | SSPB4(170463); ADRBK1(156); ALPPL2(251); ANK1(286); SLC25A6(293); |
| | | ATP6V1B2(526); BAPX1(579); C21orf2(755); CCND3(896); SCARB1(949); |
| | | CDH4(1002); CEACAM7(1087); CHES1(1112); CHGA(1113); CHRNA4(1137); |
| | | CLCN3(1182); CCR5(1234); COL5A1(1289); COL17A1(1308); CRY2(1408); |
| | | CTRL(1506); CTSB(1508); DAG1(1605); DAPK3(1613); DLX2(1746); |
| | | E4F1(1877); EBF(1879); EFNB1(1947); EGR1(1958); EGR3(1960); |
| | | EPHB4(2050); FOXD1(2297); FOXE1(2304); FOXO3A(2309); |
| | | SLC37A4(2542); B4GALT1(2683); GNA15(2769); FFAR3(2865); |
| | | GRB10(2887); GRID1(2894); GRIK3(2899); GRIN1(2902); GTF2I(2969); |
| | | HABP2(3026); HOXC5(3222); HOXC6(3223); HOXC9(3225); HPS1(3257); |
| | | PRMT1(3276); HES1(3280); DNAJB2(3300); ICA1(3382); IGF2R(3482); |
| | | IKBKB(3551); INHBB(3625); IRF1(3659); KCNA5(3741); KCNJ10(3766); |
| | | KPNB1(3837); KRTHB5(3891); LRPAP1(4043); LSS(4047); LTBP3(4054); |
| | | SMAD2(4087); ME1(4199); ATNX3(4287); MN1(4330); M |

TABLE 4-40

| | | |
|---|---|---|
| | | YCL1(4610); NDUFS3(4722); NRL(4901); NTN2L(4917); NUMA1(4926); |
| | | PDPK1(5170); PITX1(5307); PLCG1(5335); PLXNB3(5365); PPP1R10(5514); |
| | | PPP2R5C(5527); QSCN6(5768); PCYT2(5833); RALGDS(5900); RPA1(6117); |
| | | RPS11(6205); RS1(6247); SEMG1(6406); SH3BGR(6450); SLC12A4(6560); |
| | | SOD2(6648); SOX1(6656); SOX15(6665); SPN(6693); SPTB(6710); |
| hsa-miR-573 | 48; 535; | H6PD(9563); KIAA1522(57648); CCDC24(149473); OSBPL9(114883); |
| | | PRPF38A(84950); ST6GALNAC3(256435); C1orf161(126868); PRUNE(58497); |
| | | C1orf56(54964); PPP1R12B(4660); PRELP(5549); TGFB2(7042); |
| | | C1orf86(199990); FUSIP1(10772); SERBP1(26135); IGSF3(3321); |
| | | PDE4DIP(9659); RP5-998N21.6(440686); RP11-196G18.6(440689); |
| | | JARID1B(10765); KLHDC8A(55220); FLJ40869(348654); PCYOX1(51449); |
| | | IL1R1(3554); NRP2(8828); ASB1(5165); SFXN5(94097); CD8B1(926); |
| | | EDAR(10913); ORC4L(5000); COBLL1(22837); SATB2(23314); RAPH1(65059); |
| | | CHL1(10752); NKTR(4820); BSN(8927); RBM15B(29890); SLC25A26(115286); |
| | | IGSF4D(253559); EPHA3(2042); LRRIQ2(79598); FNDC3B(64778); |
| | | THRB(7068); PB1(55193); SELK(58515); CBLB(868); FSTL1(11167); |
| | | ZNF148(7707); MBD4(8930); PCGF3(10336); WHSC1(7468); TBC1D14(57533); |
| | | TMPRSS11E(28983); MOBKL1A(92597); ANK2(287); AFAP(60312); |
| | | ATP8A1(10396); CXCL9(4283); SPARCL1(8404); DNAJB14(79982); |
| | | MAP1B(4131); ARSK(153642); PCDHB12(56124); CPEB4(80315); IRX2(153572); |
| | | SEMA5A(9037); RICTOR(253260); HMGCS1(3157); F2RL2(2151); CDC23(8697); |
| | | IBRDC2(255488); ALDH5A1(7915); POLR1C(9533); FBXO9(26268); |
| | | PRSS35(167681); SASH1(23328); SERPINB9(5272); PKHD1(5314); |
| | | DJ122O8.2(57226); TMEM106B(54664); ITGB8(3696); STK17A(9263); |
| | | ADCY1(107); EGFR(1956); PMS2L5(5383); LUC7L2(51631); CASP2(835); |
| | | CYCS(54205); PURB(5814); FLJ45974(401337); CALN1(83698); BAZ1B(9031); |
| | | NAPE-PLD(222236); SLC25A37(51312); ENY2(56943); SOX7(83595); PSD3(23362); |
| | | WHSC1L1(54904); FGFR1(2260); PLAG1(5324); VCPIP1(80124); TMEM64(169200); |
| | | RBM12B(389677); FBXO32(114907); MLANA(2315); ACO1(48); UBAP1(51271); |
| | | NTRK2(4915); FCMD(2218); PALM2(114299); C9orf91(203197); RABGAP1(23637); |
| | | GPR107(57720); KIAA1815(79956); IKBKAP(8518); FBXW2(26190); FCN1(2219); |
| | | SEC61A2(55176); ZNF33A(7581); SFTPA1(6435); CCDC3(83643); C10orf67(256815); |
| | | MARCH8(220972); DNAJB12(54788); KCNMA1(3778); SFTPA2(6436); C10orf118(55088); |
| | | C10orf46(143384); GALNAC4S-6ST(51363); EBF3(253738); PARVA(55742); |
| | | OR9Q1(219956); TPCN2(219931); C11orf54(28970); LIN7C(55327); AGBL2(79841); |
| | | GRM5(2915); RBMS2(5939); NUDT4(11163); SNRPF(6636); ACAD10(80724); |
| | | FLJ10292(55110); BCAT1(586); FBXO21(23014); SBNO1(55206); FLJ2 |

TABLE 4-41

| | | |
|---|---|---|
| | | 5477(219287); DZIP1(22873); NPAS3(64067); KTN1(3895); OTUB2(78990); TCL6(27004); |
| | | KIAA0125(9834); TRMT5(57570); ACTN1(87); 76P(27229); FGF7(2252); Gcom1(145781); |
| | | RNF111(54778); ABHD2(11057); SV2B(9899); WDR72(256764); CSNK1G1(53944); |
| | | BTBD1(53339); C16orf34(90861); PDPK1(5170); SCNN1(6340); C16orf57(79650); |
| | | DEXI(28955); CMTM4(146223); ZFP3(124961); EME1(146956); KCNJ2(3759); SSTR2(6752); |
| | | KIAA1618(57714); GJA7(10052); PPP1R9B(84687); RAB31(11031); C18orf1(753); |
| | | C18orf26(284254); SPIRE1(56907); C18orf4(92126); MARCH2(51257); MGC3207(84245); |
| | | ZNF431(170959); ZNF155(7711); ZNF272(10794); SLC25A23(79085); ZNF43(7594); |
| | | ZFP30(22835); LOC284296(284296); SOX12(6666); SCRT2(85508); CD93(22918); |
| | | CHD6(84181); AGPAT3(56894); C21orf91(54149); BRWD1(54014); PTTG1IP(754); |
| | | RP5-1104E15.5(54471); TNRC6B(23112); PITPNB(23760); RP11-647M7.1(55086); |
| | | BIRC4(331); WNK3(65267); ZMAT1(84460); |
| hsa-miR-587 | 49; | TARDBP(23435); HMGN2(3151); PRKAA2(5563); LEPR(3953); GIPC2(54810); |
| | | SLC30A7(148867); RAP1A(5906); DAP3(7818); NHLH1(4807); FLJ35530(400798); |
| | | MOSC2(54996); C1orf124(83932); C1orf149(64769); PPT1(5538); EVI5(7813); |
| | | NOTCH2(4853); ARHGEF11(9826); SELE(6401); ANKRD45(339416); TOR1AIP2(163590); |
| | | TNNI1(7135); ITPKB(3707); LYST(1130); ZNF124(7678); RAB10(10890); SPDY1(245711); |
| | | FLJ13910(64795); CNNM4(26504); CNGA3(1261); PKP4(8502); LASS6(253782); |
| | | FLJ13096(80067); CYBRD1(79901); ZAK(51776); NAB1(4664); MYT1L(23040); |
| | | YWHAQ(10971); ODC1(4953); PUM2(23369); MGAT4A(11320); FLJ40629(150468); |
| | | CACNB4(785); STAM2(10254); PLA2R1(22925); SLC25A12(8604); SF3B1(23451); |
| | | ERBB4(2066); PECR(55825); WDFY1(57590); GPD1L(23171); CRTAP(10491); MOBP(4336); |
| | | IGSF4D(253559); LRRIQ2(79598); ARMC8(25852); MBNL1(4154); KCNAB1(7881); |
| | | OPA1(4976); XPC(7508); THRB(7068); IL17RD(54756); EIF4E3(317649); |
| | | KIAA2018(205717); RAB43(339122); SHOX2(6474); DCUN1D1(54165); WHSC1(7468); |
| | | FLJ35424(285492); IL8(3576); SPCS3(60559); C4orf15(79441); TNIP2(79155); |
| | | TLR10(81793); SLC7A11(23657); MFAP3L(9848); SORBS2(8470); SFRS12(140890); |
| | | F2R(2149); BHMT(635); RNF14(9604); SYNPO(11346); LSM11(134353); KCNIP1(30820); |
| | | MAML1(9794); CNOT6(57472); PRKAA1(5562); ESM1(11082); PDE4D(5144); ST8SIA4(7903); |
| | | MARCH3(115123); DKFZp686I15217(401232); BTN3A2(11118); PPP1R11(6992); |
| | | LOC401252(401252); RPL7L1(285855); LIN28B(389421); SART2(29940); SLC35F1(222553); |
| | | PEX2(8504); SSR1(6745); ZNF184(7738); IHPK3(117283); DST(667); TMEM30A(55754); |
| | | SIM1(6492); CDC2L6(23097); TSPYL1(7259); PLAGL1(5325); CREB5(958 |

TABLE 4-42

| | | 6); ZNF92(168374); ADAM22(53616); PFTK1(5218); KCND2(3751); ETV1(2115); |
|---|---|---|
| | | DRCTNNB1A(84668); OSBPL3(26031); ECOP(81552); NAPE-PLD(222236); TSGA14(95681); |
| | | XRCC2(7516); TNKS(8658); ZNF705CP(389631); LEPROTL1(23484); RDH10(157506); |
| | | PKIA(5569); C8orf38(137682); PLEKHF2(79666); WHSC1L1(54904); PAG1(55824); |
| | | TMEM55A(55529); RBM12B(389677); UQCRB(7381); EDD1(51366); TRPS1(7227); |
| | | DENND4C(55667); FXN(2395); VPS13A(23230); NCBP1(4686); NIPSNAP3A(25934); |
| | | SLC44A1(23446); FSD1CL(405752); GLIS3(169792); TRPM6(140803); PTPN3(5774); |
| | | ARL5B(221079); PCGF4(648); MAP3K8(1326); TFAM(7019); PCGF5(84333); |
| | | KIAA1600(57700); NUDT5(11164); LOC387646(387646); IRXL1(283078); NRP1(8829); |
| | | PLEKHK1(219790); MYOZ1(58529); ARL3(403); ABLIM1(3983); OR51E1(143503); |
| | | RPL27A(6157); METT5D1(196074); GPIAP1(4076); CD44(960); HSD17B12(51144); |
| | | FUT4(2526); SRP46(10929); DIXDC1(85458); PAFAH1B2(5049); CTSC(1075); |
| | | JOSD3(79101); RDX(5962); KCNJ1(3758); PPHLN1(51535); TMTC3(160418); |
| | | SLC25A3(5250); KIAA1853(84530); 15E1.2(283459); SLCO1A2(6579); SLC38A1(81539); |
| | | FAM19A2(338811); KL(9365); LRCH1(23143); HS6ST3(266722); RNF6(6049); |
| | | KATNAL1(84056); DZIP1(22873); LOC283487(283487); KIAA1333(55632); GNG2(54331); |
| | | PCNX(22990); CHX10(338917); C14orf118(55668); C14orf147(171546); TRMT5(57570); |
| | | DICER1(23405); SPRED1(161742); C15orf21(283651); Gcom1(145781); SMAD3(4088); |
| | | UBR1(197131); MYEF2(50804); MYO5A(4644); ARPP-19(10776); PRTG(283659); |
| | | LARP6(55323); BCL2A1(597); UBE2I(7329); A2BP1(54715); CYLD(1540); RBL2(5932); |
| | | NIP7(51388); MARVELD3(91862); C16orf44(79786); HSDL1(83693); RABE1(9135); |
| | | MYOCD(93649); ALDH3A2(224); MLLT6(4302); KIAA1618(57714); CXCL16(58191); |
| | | DULLARD(23399); ZNF624(57547); NUFIP2(57532); LOC641522(641522); CDC27(996); |
| | | ARHGAP28(79822); VAPA(9218); NAPG(8774); CEP192(55125); GATA6(2627); |
| | | DTNA(1837); SLC14A1(6563); B4GALT6(9331); RNF152(220441); BCL2(596); |
| | | ZNF441(126068); ZNF253(56242); ZNF473(25888); FLJ38288(284309); EMR3(84658); |
| | | OR7A5(26659); ZFP260(339324); FLJ37549(163115); ZNF577(84765); ZNF417(147687); |
| | | C20orf133(140733); POFUT1(23509); ITCH(83737); SLC2A10(81031); CHD6(84181); |
| | | SLC5A3(6526); KCNJ15(3772); ETS2(2114); RUNX1(861); BRWD1(54014); SNAP29(9342); |
| | | CTB-1048E9.5(402055); APOL6(80830); HPS4(89781); dJ341D10.1(286453); |
| | | ARMCX4(158947); RP11-321G1.1(54885); LOC203547(203547); FAM9C(171484); |
| | | PIGA(5277); CTPS2(56474); WNK3(65267); DCX(1641); RAB39B(116442); PRKY(5616); |
| | | TSPY1(7258); |
| hsa-miR-593 | 50; | KCNAB2(8514); CAMTA1(23261); H6PD(9563); SPSB1(80176); S |

TABLE 4-43
ERINC2(347735); GJA4(2701); NCDN(23154);
C1orf83(127428); ACOT11(26027); GNAI3(2773);
FAM46C(54855); RBM8A(9939); IGSF4B(57863);
FLJ35530(400798); PKP1(5317); IPO9(55705);
PPP1R12B(4660); C1orf95(375057); RHOU(58480);
EDARADD(128178); MTR(4548); RPL22(6146);
ALDH4A1(8659); FUSIP1(10772); SIKE(80143);
IGSF3(3321); NMNAT2(23057); TMEM63A(9725);
ZNF496(84838); DPYSL5(56896); TRIM54(57159);
LYCAT(253558); BRRN1(23397); ARHGEF4(50649);
FMNL2(114793); ZAK(51776); TUBA4(80086);
SFXN5(94097); EDAR(10913); GTDC1(79712);
C2orf19(394261); MKRN2(23609); NR2C2(7182);
DLEC1(9940); TREX1(11277); SPCS1(28972);
ROBO2(6092); MRAS(22808); KLHL24(54800);
SRGAP3(9901); TMEM16K(55129); LTF(4057);
CACNA2D2(9254); IL17RD(54756);
PRICKLE2(166336); ADCY5(111); LRRC15(131578);
BDH1(622); PCGF3(10336); TMEM129(92305);
MXD4(10608); LRPAP1(4043); DNAJA5(134218);
MFAP3(4238); UBXD8(23197); N4BP3(23138);
TPPP(11076); RPL37(6167); P18SRP(285672);
APBB3(10307); CAMK2A(815); ADAM19(8728);
PACSIN1(29993); MDGA1(266727); TRAM2(9697);
HS3ST5(222537); TTYH3(80727); FKBP9(11328);
UBE2D4(51619); ZFP95(23660); URG4(55665);
FKBP9L(360132); CDK6(1021); FAM77D(286183);
PI15(51050); CPNE3(8895); WISP1(8840);
KIAA1875(340390); PSD3(23362); KIF13B(23303);
FGFR1(2260); C9orf47(286223); TTC16(158248);
ADAMTS13(11093); RXRA(6256); ZBTB5(9925);
MCART1(92014); OGN(4969); PTCH(5727);
TRIM14(9830); C9orf157(402381); ZNF488(118738);
EIF4EBP2(1979); SGPL1(8879); SUFU(51684);
C10orf72(196740); DNAJB12(54788); SFTPA2(6436);
EPS8L2(64787); TEAD1(7003);
DKFZp686O24166(374383); TMEM86A(144110);
STX3A(6809); C11orf11(747); TPCN2(219931);
PHLDB1(23187); ARHGEF12(23365);
NAP1L4(4676); RHOG(391); RAB6IP1(23258);
FLJ90834(283135); ORAOV1(220064); GAB2(9846);
GRM5(2915); JOSD3(79101); THY1(7070);
OPCML(4978); DAZAP2(9802); ACVR1B(91);
SP1(6667); METTL7B(196410); LNK(10019);
PRICKLE1(144165); ADCY6(112);
KIAA0286(23306); NFYB(4801); GIT2(9815);
DKFZp451A211(400169); VASH1(22846);
KIAA0284(283638); KIAA0125(9834);
C14orf143(90141); ANKRD9(122416); GANC(2595);
RAB11A(8766); IL16(3603); ZSCAN2(54993);
ZNF592(9640); ALPK3(57538); SUHW4(54816);
DPP8(54878); RGMA(56963); E4F1(1877);
ZNF213(7760); GLIS2(84662); PSKH1(5681);
C16orf28(65259); FAM100A(124402);
THUMPD1(55623); ZNF694(342357);
C16orf58(64755); CMTM4(146223); HSDL1(83693);
SMCR7(125170); RASL10B(91608); SOCS7(30837);
WIRE(147179); ARMC7(79637); KIAA0195(9772);
C17orf27(57674); TBCD(6904); ATP2A3(489);
FLOT2(2319); MYO1D(4642); RAD51L3(5892

TABLE 4-44

| | | |
|---|---|---|
| | | ); DDX52(11056); DUSP3(1845); MPP2(4355); ANKRD40(91369); SCN4A(6329); |
| | | PECAM1(5175); HELZ(9931); NT5C(30833); RNF157(114804); TMC6(11322); |
| | | C17orf55(284185); MBD1(4152); FSTL3(10272); DOT1L(84444); SPPL2B(56928); |
| | | GATAD2A(54815); APOE(348); LOC91661(91661); ZNF551(90233); MBD3(53615); |
| | | PLEKHJ1(55111); BRD4(23476); PRX(57716); C20orf91(284800); KIF3B(9371); |
| | | RTEL1(51750); RNF24(11237); RIMS4(140730); TMEPAI(56937); GM632(57473); |
| | | PRMT2(3275); C21orf77(55264); DGCR8(54487); P2RXL1(9127); KDELR3(11015); |
| | | TEF(7008); PPARA(5465); DIP(23151); CECR6(27439); HTF9C(27037); |
| | | MAPK1(5594); PPM1F(9647); SUHW2(140883); ZNF70(7621); DUSP18(150290); |
| | | APOL4(80832); UNC84B(25777); SHOX(6473); MSN(4478); OPHN1(4983); |
| | | RNF12(51132); CD99L2(83692); |
| hsa-miR-595 | 51; | ZBTB40(9923); TXLNA(200081); KIAA1522(57648); MACF1(23499); MGC33556(339541); |
| | | AK5(26289); SCYL1BP1(92344); PRELP(5549); FABP3(2170); COL24A1(255631); |
| | | TGFBR3(7049); FCRL5(83416); SH2D1B(117157); RGS5(8490); STX6(10228); |
| | | GLT25D2(23127); TNNI1(7135); C1orf96(126731); FLJ25143(130813); LPIN1(23175); |
| | | CAD(790); LOC93349(93349); FLJ31438(130162); SERTAD2(9792); ST6GAL2(84620); |
| | | FLJ10996(54520); DARS(1615); TLK1(9874); FLJ43879(401039); CRTAP(10491); |
| | | MOBP(4336); TIPARP(25976); LPP(4026); SENP5(205564); OXTR(5021); ZCSL2(285381); |
| | | THRB(7068); MAP4(4134); SFMBT1(51460); FOXP1(27086); EIF5A2(56648); |
| | | FGFRL1(53834); WHSC1(7468); LOC345222(345222); STK32B(55351); CPEB2(132864); |
| | | EREG(2069); SEPT11(55752); FRAS1(80144); AFF1(4299); TRIM2(23321); STOX2(56977); |
| | | MLR1(254251); RNF150(57484); NR3C2(4306); ITGA2(3673); FLJ13611(80006); |
| | | RASA1(5921); RHOBTB3(22836); GABRA1(2554); SEMA5A(9037); PPAP2A(8611); |
| | | FLJ44796(401209); AFF4(27125); PHACTR2(9749); SASH1(23328); DJ122O8.2(57226); |
| | | HBS1L(10767); TMEM106B(54664); MPP6(51678); GHRHR(2692); EGFR1(1956); |
| | | ZNF138(7697); PMS2L5(5383); TES(26136); MET(4233); MGC11257(84310); INHBA(3624); |
| | | H2AFV(94239); PURB(5814); FLJ45974(401337); ZNF3(7551); RABL5(64792); |
| | | GPR85(54329); KIAA0773(9715); CHMP7(91782); LEPROTL1(23484); SPFH2(11160); |
| | | C8orf72(90362); ATP6V1C1(528); SLC30A8(169026); FAM91A1(157769); C8orf30A(51236); |
| | | SOX7(83595); CNOT7(29883); ENTPD4(9583); WHSC1L1(54904); ST18(9705); |
| | | REXO1L1(254958); HAS2(3037); FBXO32(114907); NTRK2(4915); SLC31A1(1317); |
| | | OLFML2A(169611); TOR1B(27348); GPR107(57720); PRDM12(59335); DIRAS2(54769); |
| | | AKNA(80709); ZDHHC12(84885); QSCN6L1(169714); REEP3(221085); PCGF5(84333); |
| | | ENTPD7(57089); SFXN2(118980); SORCS3(22986); PTPRE(5791); MGEA5(10724); ZFP91( |

TABLE 4-45

| | | |
|---|---|---|
| | | 80829); FLJ10661(55199); NCAM1(4684); STS-1(84959); SLC22A8(9376); HBXAP(51773); |
| | | RAB30(27314); FZD4(8322); TSPAN9(10867); DNM1L(10059); BRI3BP(140707); |
| | | CACNA2D4(93589); GPR92(57121); GRIN2B(2904); SOX5(6660); KIF21A(55605); |
| | | ATP8A2(51761); ITR(160897); FLJ10357(55701); ARHGAP5(394); MGAT2(4247); |
| | | KIAA0247(9766); NRXN3(9369); SLC24A4(123041); TCL6(27004); KIAA0329(9895); |
| | | TRAF3(7187); SEL1L(6400); SPRED1(161742); RNF111(54778); FAM103A1(83640); |
| | | MYEF2(50804); BNIP2(663); PDPK1(5170); ITGAL(3683); WWP2(11060); MARVELD3(91862); |
| | | RPL13(6137); ADCY9(115); MIR16(51573); FANCA(2175); MGC3101(79007); ZNF286(57335); |
| | | GOSR2(9570); KIAA0753(9851); FAM106A(80039); HELZ(9931); H3F3B(3021); ACOX1(51); |
| | | TBC1D16(125058); RNMT(8731); YES1(7525); C18orf19(125228); DYM(54808); |
| | | LMAN1(3998); ILF3(3609); TPM4(7171); ZNF431(170959); ZNF585A(199704); DUXA(503835); |
| | | SNRPB2(6629); PHACTR3(116154); RSPO4(343637); RASSF2(9770); RBBP9(10741); |
| | | BCL2L1(598); PLAGL2(5326); RBM12(10137); DIDO1(11083); CRYZL1(9946); PLAC4(191585); |
| | | UBE2G2(7327); SLC19A1(6573); TNRC6B(23112); PPARA(5465); PITPNB(23760); |
| | | PRRG1(5638); OGT(8473); DIAPH2(1730); RP11-321G1.1(54885); AFF2(2334); KAL1(3730); |
| | | ARHGAP6(395); RGAG4(340526); RP13-383K5.1(55285); MECP2(4204); |
| hsa-miR-604 | 52; | ESPN(83715); H6PD(9563); TAL1(6886); HPCAL1(3241); TRIM54(57159); LOC401286(401286); |
| | | FLJ20397(54919); CUTL1(1523); LRRC14(9684); C8orf13(83648); CEBPD(1052); |
| | | TRIM14(9830); CHST3(9469); C10orf39(282973); FLJ42258(440049); SFRS8(6433); |
| | | MSI1(4440); SLC7A1(6541); GALNTL1(57452); TRAF3(7187); SPTB(6710); FLJ39779(400223); |
| | | FLYWCH1(84256); MGC2654(79091); WWP2(11060); RUTBC1(9905); RAI1(10743); |
| | | RAB11FIP4(84440); SOCS7(30837); FMNL1(752); TBC1D16(125058); MAFG(4097); |
| | | GRIN3B(116444); STK11(6794); MUM1(84939); APC2(10297); REEP6(92840); ATCAY(85300); |
| | | MAP2K7(5609); KCTD15(79047); WDR62(284403); GNG7(2788); CD209(30835); GRIK5(2901); |
| | | PDXK(8566); GAS2L1(10634); FBLN1(2192); PPARA(5465); PPM1F(9647); ABCA3(21); |
| | | ABO(28); ACACA(31); ADAR(103); AP2A1(160); ABCD1(215); SLC25A4(291); ANXA13(312); |
| | | APBA2(321); APOE(348); ARF1(375); ARHGAP6(395); ARHGDIA(396); PHOX2A(401); |
| | | ASPH(444); ATP2B3(492); KIF1A(547); BCL7A(605); BDH1(622); BMP1(649); BOK(666); |
| | | FOXL2(668); C11orf2(738); PTTG1IP(754); C21orf2(755); CA4(762); CAMK2G(818); |
| | | CAPN3(825); CASP2(835); RUNX1(861); CBFA2T3(863); CD68(968); CD74(972); |
| | | CDKN2A(1029); CHRNA4(1137); PLK3(1263); CPM(1368); CRHR1(1394); CRYAA(1409); |
| | | DMWD(1762); DTX1(1840); DUSP3(185 |

TABLE 4-46

| | | |
|---|---|---|
| | | 0); E4F1(1877); CELSR2(1952); ELAVL1(1994); MARK2(2011); EMX1(2016); |
| | | EN2(2020); CLN8(2055); EXTL1(2134); |
| hsa-miR-612 | 53; 1460; | PRDM16(63976); C1orf188(148646); H6PD(9563); PQLC2(54896); FLJ32784(127731); |
| | | LDLRAD2(401944); RBBP4(5928); C1orf84(149469); C1orf190(541468); |
| | | FAM20B(9917); PRELP(5549); C1orf95(375057); C1orf69(200205); PLEKHG5(57449); |
| | | WNT4(54361); C1orf135(79000); LOC113444(113444); CLSPN(63967); INPP5B(3633); |
| | | BMP8B(656); OXCT2(64064); RIMS3(9783); CLCC1(23155); SIKE(80143); |
| | | KIF21B(23046); TNNI1(7135); FMOD(2331); PLEKHA6(22874); IRF6(3664); |
| | | ANGEL2(90806); ITPKB(3707); C1orf145(574407); PLEKHH2(130271); |
| | | PTPN18(26469); BBS5(129880); DUSP19(142679); CGREF1(10669); |
| | | FLJ34931(388939); AFF3(3899); CAPN7(23473); OXNAD1(92106); DLEC1(9940); |
| | | HEMK1(51409); FAM55C(91775); ARGFX(503582); CLDN11(5010); YEATS2(55689); |
| | | ADIPOQ(9370); SENP5(205564); XPC(7508); CYP8B1(1582); TMEM16K(55129); |
| | | CDCP1(64866); MGC21675(92070); KIAA1712(80817); LETM1(3954); MXD4(10608); |
| | | KIAA1909(153478); CENPH(64946); MARVELD2(153562); SERF1A(8293); WDR55(54853); |
| | | MST150(85027); LAPR1(23367); ALDH7A1(501); SAR1B(51128); CAMK2A(815); |
| | | ADAM19(8728); LMAN2(10960); TREML4(285852); FOXP4(116113); PHACTR2(9749); |
| | | AGPAT1(10554); TEAD3(7005); MDGA1(266727); SLC17A5(26503); PIP3-E(26034); |
| | | TFB1M(51106); CREB5(9586); DKFZp761I2123(83637); VKORC1L1(154807); |
| | | CYCS(54205); RASA4(10156); MGC14289(92092); ZC3HAV1(56829); |
| | | LOC401431(401431); VIPR2(7434); PDLIM2(64236); SPFH2(11160); INDOL1(169355); |
| | | PTP4A3(11156); LOC349196(349196); JRK(8629); LYNX1(66004); C9orf76(80010); |
| | | C9orf47(286223); DAB2IP(153090); TBC1D13(54662); TRIM14(9830); AKNA(80709); |
| | | ASB6(140459); RAPGEF1(2889); ABO(28); C10orf104(119504); SEC24C(9632); |
| | | BTRC(8945); GPR26(2849); LRRC27(80313); VENTX(27287); C10orf111(221060); |
| | | MARCH8(220972); OBFC1(79991); SYT8(90019); FKSG44(83786); BBS1(582); |
| | | CRSP6(9440); SC5DL(6309); SYT13(57586); FADS1(3992); ZBTB3(79842); |
| | | SHANK2(22941); DDX11(1663); FLJ20489(55652); METTL7A(25840); RBMS2(5939); |
| | | MDM2(4193); KIAA1853(84530); ULK1(8408); CDCA3(83461); CBX5(23468); |
| | | STAT2(6773); B4GALNT1(2583); NT5DC3(51559); CORO1C(23603); ATP8A2(51761); |
| | | RFP2(10206); ATP7B(540); RNF31(55072); PAPLN(89932); TRAF3(7187); |
| | | KIAA0125(9834); KIAA0831(22863); SPTLC2(9517); CHES1(1112); KLF13(51621); |
| | | EIF3S1(8669); TLN2(83660); SNX22(79856); ZNF609(23060); PML(5371); |
| | | ARNT2(9915); IL16(3603); SCAND2(54581); AKAP13(11214); LRRK1(79705); |
| | | EXDL1(161829); C15orf38(348110); RAB11FIP3(9727); MAPK8IP3(23162); |
| | | SYNGR3(9143); TRAF7(84231); CI |

TABLE 4-47

| | | |
|---|---|---|
| | | ITA(4261); JMJD5(79831); SPN(6693); FUS(2521); GNAO1(2775); HSPC065(29070); |
| | | BOLA2(552900); STX1B2(112755); PLLP(51090); EXOSC6(118460); SLC7A5(8140); |
| | | ZFP3(124961); SARM1(23098); RAB11FIP4(84440); EIF1(10209); CD300LG(146894); |
| | | NXPH3(11248); PRKCA(5578); KCTD2(23510); SEPT9(10801); ABR(29); |
| | | POLDIP2(26073); HCP1(113235); SSH2(85464); TBC1D3C(414060); LOC162427(162427); |
| | | GJA7(10052); GFAP(2670); APPBP2(10513); PECAM1(5175); CASKIN2(57513); |
| | | TBC1D16(125058); APC2(10297); GIPC3(126326); SSBP4(170463); UBA52(7311); |
| | | LOC148137(148137); PLEKHG2(64857); PVR(5817); APOE(348); HIF3A(64344); |
| | | CALM3(808); EHD2(30846); RPL28(6158); MBD3(53615); PLEKHJ1(55111); |
| | | PIP5K1C(23396); ZNF490(57474); IL12RB1(3594); OPA3(80207); DMWD(1762); |
| | | FUT1(2523); KLK10(5655); PRND(23627); PLCB1(23236); POFUT1(23509); |
| | | CBFA2T2(9139); STK4(6789); RTEL1(51750); FKBP1A(2280); RNF24(11237); |
| | | GGTL3(2686); SAMHD1(25939); RP5-1054A22.3(85449); PTGIS(5740); DIDO1(11083); |
| | | DSCR3(10311); LSS(4047); DGCR8(54487); APOL6(80830); SYNGR1(9145); |
| | | LOC63929(63929); PPARA(5465); CECR1(51816); FLJ21125(79680); PPM1F(9647); |
| | | C22orf13(83606); LOC388886(388886); NFAM1(150372); LDOC1L(84247); |
| | | FLJ41993(400935); MLC1(23209); ECGF1(1890); CHKB(1120); WWC3(55841); |
| | | RP1-112K5.2(90121); TFE3(7030); ARHGEF9(23229); RNF12(51132); MECP2(4204); |
| hsa-miR-625 | 54; | S100A7L1(338324); IGSF4B(57863); CSMD2(114784); PLEKHA6(22874); |
| | | C1orf198(84886); MXD1(4084); TMEM16G(50636); SERTAD2(9792); PAK2(5062); |
| | | PCDHGA1(56114); ZNF346(23567); NSD1(64324); SPOCK1(6695); C6orf134(79969); |
| | | BRPF3(27154); KIAA0082(23070); ESR1(2099); ATXN1(6310); RASA4(10156); |
| | | CTSB(1508); PAG1(55824); UBE2R2(54926); TSC1(7248); KIAA1754(85450); |
| | | TSPAN18(90139); SP1(6667); SETD8(387893); UBE2N(7334); AKAP11(11215); |
| | | FLJ40296(122183); DCAMKL1(9201); SORD(6652); FBXL19(54620); KIAA0513(9764); |
| | | STX1B2(112755); NF1(4763); MLLT6(4302); LASP1(3927); UBE2Z(65264); |
| | | IGF2BP1(10642); NXPH3(11248); STXBP4(252983); HOXB3(3213); TBC1D16(125058); |
| | | NFIX(4784); PTPRS(5802); JUND(3727); EPB41L1(2036); ITSN1(6453); RUNX1(861); |
| | | TNRC6B(23112); RBM9(23543); DDX17(10521); APLN(8862); |
| hsa-miR-634 | 55; | CLCN6(1185); PLA2G2F(64600); ZBTB40(9923); PDIK1L(149420); EIF2C4(192670); |
| | | FAM102B(284611); CSF1(1435); HIPK1(204851); C1orf60(65123); ATP8B2(57198); |
| | | PBX1(5087); PRRX1(5396); C1orf21(81563); ATP2B4(493); SNRPE(6635); CTSE(1510); |
| | | PFKFB2(5208); TRAF5(7188); KMO(8564); UBE2J2(118424); CPSF3L(54973); |
| | | TTMB(399474); KIAA0319L(79932); YRDC(79693); TESK2( |

TABLE 4-48
10420); C1orf163(65260); TGFBR3(7049);
MUC1(4582); TEDDM1(127670); KIF21B(23046);
LPGAT1(9926); ENAH(55740); LYCAT(253558);
PCYOX1(51449); FLJ20758(55037); ZAK(51776);
LOC339768(339768); ASB1(51665); GPC1(2817);
CYS1(192668); SFXN5(94097); TGOLN2(10618);
TBC1D8(11138); WDR33(55339); TIGD1(200765);
TATDN2(9797); NR2C2(7182); ARPP-21(10777);
ZNF621(285268); LARS2(23395); IL17RB(55540);
C3orf37(56941); USP13(8975); DVL3(1857);
SRGAP3(9901); LOC401052(401052); RAF1(5894);
MRPS25(64432); ZFYVE20(64145);
ZNF445(353274); IHPK2(51447); GPX1(2876);
TMEM110(375346); FOXP1(27086); MAK3(80218);
EIF5A2(56648); PCGF3(10336); HD(3064);
RGS12(6002); CD38(952); CCRN4L(25819);
SLC26A1(10861); LETM1(3954); FBXW7(55294);
CCT5(22948); RHOBTB3(22836); WDR36(134430);
DCP2(167227); ARHGAP26(23092);
SLC36A1(206358); SEMA5A(9037);
RICTOR(253260); CAMK2A(815);
PHACTR1(221692); CSNK2B(1460);
PACSIN1(29993); SLC22A7(10864);
TCF21(6943); RP5-875H10.1(389432);
C6orf71(389434); AKAP12(9590);
C6orf62(81688); C6orf106(64771);
CLIC5(53405); TRAM2(9697); LFNG(3955);
C7orf16(10842); ADCY1(107);
KIAA0828(23382); CNTNAP2(26047);
NOM1(64434); SNX8(29886); JAZF1(221895);
MTPN(136319); ABCF2(10061); TNKS(8658);
PI15(51050); CRISPLD1(83690);
ATP6V1C1(528); RHPN1(114822); CTSB(1508);
ENTPD4(9583); BRF2(55290); WHSC1L1(54904);
FGFR1(2260); REXO1L1(254958); MAK10(60560);
C9orf47(286223); TGFBR1(7046);
C9orf7(11094); LCN12(286256);
C9orf25(203259); FANCC(2176); ANKS6(203286);
STRBP(55342); GOLGA1(2800); SURF5(6837);
BRD3(8019); HSPA14(51182); SEC24C(9632);
KIAA1128(54462); SCD(6319); MTG1(92170);
ABI1(10006); NRP1(8829); AP3M1(26985);
DUSP13(51207); HPS1(3257); ACTR1A(10121);
IGHMBP2(3508); TPCN2(219931);
ABCG4(64137); LOC89944(89944);
MUCDHL(53841); CD59(966); AYP1(84153);
CHKA(1119); MAP6(4135); FEZ1(9638);
SNX19(399979); TMTC3(160418); TCF1(6927);
MLXIP(22877); DUSP16(80824); LMO3(55885);
TMTC1(83857); KRT2B(51350); CTDSP2(10106);
EEA1(8411); ATXN2(6311); HRK(8739);
EPIM(2054); RFC3(5983); FLJ25477(219287);
KATNAL1(84056); C14orf35(122830);
DLST(1743); VASH1(22846); NRXN3(9369);
SLC24A4(123041); KIAA0125(9834);
KIAA0831(22863); RAB15(376267); DPF3(8110);
ZDHHC22(283576); GOLGA8E(390535);
GOLGA8G(283768); EIF3S1(8669); RAB11A(8766);
LOC440295(440295); ALPK3(57538); FURIN(5045);
ASB7(140460); SUHW4(54816); UACA(55075);
GRAMD2(196996); MESDC2(23184);
FLJ36208(283948); KIAA1924(197335); CCNF(899);
PDPK1(5170); NUBP1(4682); NFATC3(4775);
CRISPLD2(83716); ADCY9(115); GSPT1(2935); N4B

TABLE 4-49

| | | |
|---|---|---|
| | | P1(9683); NUDT21(11051); CMTM4(146223); HSDL1(83693); MYOCD(93649); TTC19(54902); |
| | | SARM1(23098); RAB11FIP4(84440); CDK5R1(8851); SOCS7(30837); STARD3(10948); |
| | | NXPH3(11248); MSI2(124540); LLGL2(3993); ENPP7(339221); CARKL(23729); |
| | | UNQ5783(388325); RAD51L3(5892); NLE1(54475); PIP5K2B(8396); PLXDC1(57125); |
| | | ANKRD40(91369); RECQL5(9400); WBP2(23558); C17orf70(80233); MAFG(4097); |
| | | ZNF24(7572); MBD1(4152); MBP(4155); TXNL4A(10907); FSTL3(10272); GRIN3B(116444); |
| | | MUM1(84939); FZR1(51343); IER2(9592); UBA52(7311); LOC115648(115648); |
| | | ZNF507(22847); MGC13096(84306); C19orf26(255057); BTBD3(22903); KIF3B(9371); |
| | | C20orf4(25980); LOC128439(128439); SLC2A10(81031); DNAJC5(80331); RNF24(11237); |
| | | KCNB1(3745); GM632(57473); ITSN1(6453); PDXK(8566); COL6A2(1292); BRWD1(54014); |
| | | PLAC4(191585); ICOSLG(23308); PEX26(55670); P2RXL1(9127); LOC400891(400891); |
| | | HMG2L1(10042); TRIOBP(11078); GTPBP1(9567); ADM2(79924); HTF9C(27037); |
| | | MAPK1(5594); C1QTNF6(114904); CBX6(23466); LDOC1L(84247); CERK(64781); |
| | | CHKB(1120); XK(7504); OGT(8473); AFF2(2334); FUNDC2(65991); MECP2(4204); |
| | | DAZ2(57055); |
| hsa-miR-635 | 56; | PRDM16(63976); KIAA1026(23254); LDLRAD2(401944); EPB41(2035); ST3GAL3(6487); |
| | | SLC30A7(148867); SLC6A17(388662); PEA15(8682); C1orf21(81563); PRELP(5549); |
| | | RASSF5(83593); CHD5(26038); PLA2G2D(26279); COL8A2(1296); AMIGO1(57463); |
| | | SYT2(127833); CASP10(843); CD28(940); ANKZF1(55139); LOC339768(339768); |
| | | UCN(7349); ADD2(119); TMEM127(55654); TGFBRAP1(9392); PAX8(7849); XYLB(9942); |
| | | CXCR6(10663); TREX1(11277); C3orf45(132228); SAMD7(344658); C3orf40(131408); |
| | | CIDEC(63924); C3orf63(23272); ZXDC(79364); MGLL(11343); KY(339855); ZIC4(84107); |
| | | NARG1(80155); DGKQ(1609); PHOX2B(8929); KIAA0141(9812); FLJ22318(64777); |
| | | TPPP(11076); IRF1(3659); SH3PXD2B(285590); HMGA1(3159); SCUBE3(222663); |
| | | RPL7L1(285855); SRF(6722); SLC22A7(10865); FLJ10159(55084); HLA-DOA(3111); |
| | | UBE2J1(51465); TTYH3(80727); YKT6(10652); ADCY1(107); ZNF655(79027); |
| | | SNX8(29886); LOC401357(401357); C8orf30A(51236); REXO1L1(254958); ZNF250(58500); |
| | | TBC1D13(54662); FREQ(23413); C9orf58(83543); C9orf96(169436); KCNT1(57582); |
| | | AQP7(364); KIAA1161(57462); FBXW2(26190); HSPA5(3309); TSC1(7248); |
| | | ENTPD7(57089); C10orf39(282973); MTG1(92170); MARCH8(220972); SFTPA2(6436); |
| | | SORBS1(10580); SPFH1(10613); SEC31L2(25956); SH3PXD2A(9644); RPL27A(6157); |
| | | PARVA(55742); TEAD1(7008); CD59(966); TP53I11(9537); SYVN1(84447); |
| | | MRPL11(65003); SPTBN2(6712); ARRB1(408); HBXAP(51773); TMPRSS13(84000); |
| | | CACNA1C(775); FKBP4(2288); FLJ22028(79912); PF |

TABLE 4-50

| | | |
|---|---|---|
| | | DN5(5204); KIAA1853(84530); HIP1R(9026); VAMP1(6843); FMNL3(91010); SLC11A2(4891); |
| | | GALNTL1(57452); RGS6(9628); C14orf111(51077); CPSF2(53981); TNFAIP2(7127); |
| | | ZNF219(51222); TM9SF1(10548); TRMT5(57570); DPF3(8110); DIO2(1734); 76P(27229); |
| | | CORO2B(10391); IL16(3603); SCAND2(54581); PLA2G4F(255189); SERINC4(619189); |
| | | TSPAN3(10099); ACSBG1(23205); AP3S2(10239); SCNN1G(6340); NDRG4(65009); CDH1(999); |
| | | VPS4A(27183); CRISPLD2(83716); DOK4(55715); CMTM4(146223); LOC283849(283849); |
| | | SMPD3(55512); TNFSF12(8742); MAP2K3(5606); KSR1(8844); CPD(1362); |
| | | RAB11FIP4(84440); MLLT6(4302); IGFBP4(3487); MLX(6945); NBR2(10230); ITGB3(3690); |
| | | TMEM92(162461); STXBP4(252983); ACE(1636); SEPT9(10801); CBX2(84733); ABR(29); |
| | | CAMKK1(84254); TOP2A(7153); HDAC5(10014); HOXB5(3215); MXRA7(439921); |
| | | TBC1D16(125058); FLJ46026(400627); GNAL(2774); IXL(55588); PVR(5817); |
| | | FLJ00060(90011); ZNF264(9422); ZNF551(90233); MBD3(53615); PLAC2(257000); |
| | | FUT5(2527); COL5A3(50509); PRX(57716); OPA3(80207); GGTL3(2686); TGM2(7052); |
| | | PTPRT(11122); PPP1R3D(5509); GM632(57473); SAMD10(140700); TRPM2(7226); |
| | | PLAC4(191585); NF2(4771); PPARA(5465); YPEL1(29799); C22orf13(83606); TPST2(8459); |
| | | CBX6(23466); NAGA(4668); TMEM28(27112); RPS6KA3(6197); CRSP2(9282); PHF8(23133); |
| | | GAB3(139716); |
| hsa-miR-637 | 57; | SAMD11(148398); PRDM16(63976); HES3(390992); PQLC2(54896); PLA2G2F(64600); |
| | | CCDC21(64793); GPR3(2827); KIAA1522(57648); NCDN(23154); C1orf60(65123); |
| | | LMNA(4000); IGSF4B(57863); PCTK3(5129); MAPKAPK2(9261); CPSF3L(54973); |
| | | TNFRSF14(8764); PLEKHG5(57449); HSPG2(3339); RUNX3(864); SDC3(9672); |
| | | NBPF4(148545); MPZ(4359); KHK(3795); SMYD5(10322); CTDSP1(58190); ITM2C(81618); |
| | | TMEM16G(50636); CGREF1(10669); ADRA2B(151); TMEM127(55654); PAX8(7849); |
| | | HS6ST1(9394); KIF1A(547); STAC(6769); EEFSEC(60678); DVL3(1857); CACNA2D2(9254); |
| | | DCP1A(55802); RAB43(339122); LRRC15(131578); MUC4(4585); WHSC1(7468); |
| | | SORCS2(57537); FLJ35725(152992); LETM1(3954); AFAP(60312); KIAA1909(153478); |
| | | GALNT10(55568); CPLX2(10814); N4BP3(23138); TPPP(11076); SLC12A7(10723); |
| | | MCC(4163); FCHSD1(89848); PDGFRB(5159); SYNGAP1(8831); SCUBE3(222663); |
| | | TTBK1(84630); MYO6(4646); MDGA1(266727); TRAM2(9697); AGPAT4(56895); |
| | | CYP2W1(54905); EGFR(1956); BCAP29(55973); PTCD1(26024); LRCH4(4034); PERQ1(64599); |
| | | EPHB4(2050); RASA4(10156); KIAA0773(9715); BMP1(649); ZNF703(80139); LZTS1(11178); |
| | | KIF13B(23303); PAG1(55824); SCRT1(83482); C9orf47(286223); FGD3(89846); |
| | | ADAMTSL2(9719); GRIN1(2902); FAM78A(286336); TSC1(7248); C9orf140(89958); KND |

TABLE 4-51

| | | |
|---|---|---|
| | | C1(85442); SPOCK2(9806); SEC31L2(25956); C11orf11(747); PACS1(55690); |
| | | CNIH2(254263); MGC33486(256472); RAD9A(5883); CABP4(57010); TAGLN(6876); |
| | | FLJ45300(399957); IRF7(3665); MUCDHL(53841); SLC25A22(79751); ABTB2(25841); |
| | | TRAF6(7189); SYVN1(84447); BCL9L(233149); NR4A1(3164); FAM101A(144347); |
| | | CACNA2D4(93589); KRTHB5(3891); FAM109A(144717); ABCB9(23457); SCARB1(949); |
| | | FLJ40296(122183); ATP11A(23250); TMEM63C(57156); KIAA0329(9895); RNASE13(440163); |
| | | FLJ25222(374666); FLJ38723(255180); KIAA1924(197335); MAPK8IP3(23162); |
| | | GLIS2(84662); GNAO1(2775); MMP15(4324); WWP2(11060); CCDC78(124093); TPSG1(25823); |
| | | C16orf58(64755); CMTM4(146223); LOC283849(283849); TNFSF12(8742); |
| | | RAB11FIP4(84440); LASP1(3927); RARA(5914); RND2(8153); MGC3123(79089); MAPT(4137); |
| | | PRKCA(5578); CDR2L(30850); BAIAP2(10458); MNT(4335); CORO6(84940); |
| | | TBC1D3C(414060); NR1D1(9572); DUSP3(1845); PPP149B(84687); BZRAP1(9256); |
| | | USH1G(124590); EXOC7(23265); FLJ45079(400624); FLJ46026(400627); ARHGDIA(396); |
| | | PCYT2(5833); NFATC1(4772); MIDN(90007); APC2(10297); SF3A2(8175); FZR1(51343); |
| | | GIPC3(126326); MPA2K7(5609); CNN1(1264); NFIX(4784); F2RL3(9002); |
| | | MGC26694(284439); GATAD2A(54815); LOC148137(148317); KLC3(147700); HIF3A(64344); |
| | | DHX34(9704); EHD2(30846); LENG8(114823); RNF126(55658); C19orf23(148046); |
| | | TCF3(6929); BTBD2(55643); MKNK2(2872); MOBKL2A(126308); SGTA(6449); ZBTB7A(51341); |
| | | PTPRS(5802); RANBP3(8498); ELL(8178); LASS1(10715); SF4(57794); C19orf12(83636); |
| | | FLJ36445(163183); PRX(57716); POU2F2(5452); DMWD(1762); SLC8A2(6543); NAPA(8775); |
| | | KLK4(9622); SNPH(9751); KCNK15(60598); RTEL1(51750); ZGPAT(84619); FKBP1A(2280); |
| | | C20orf112(140688); PTPRT(11122); C20orf58(128414); CHRNA4(1137); GM632(57473); |
| | | KRTAP10-10(353333); C21orf58(54058); TSSK2(23617); CABP7(164633); GGA1(26088); |
| | | PPARA(5465); DIP(23151); RBM9(23543); SOX10(6663); CBX6(23466); CBX7(23492); |
| | | CHKB(1120); SHOX(6473); NLGN3(54413); PNMA3(29944); IQSEC2(23096); MECP2(4204); |
| hsa-miR-647 | 58; | ST3GAL3(6487); FDPS(2224); C1orf21(81563); WASF2(10163); PHC2(1912); |
| | | KIAA0319L(79932); SLC1A7(6512); C1orf183(55924); POGZ(23126); ISG20L2(81875); |
| | | RBJ(51277); FLJ40172(285051); HEMK1(51409); TMEM110(375346); MXD4(10608); |
| | | ZFAND3(60685); LFNG(3955); PLAG1(5324); TRIM14(9830); UNC5B(219699); CHST3(9469); |
| | | C10orf39(282973); DAK(26007); PCSK7(9159); SCN2B(6327); LRRC23(10233); |
| | | FBXW8(26259); KIAA0152(9761); TCF1(6927); LOC440138(440138); SLC7A1(6541); |
| | | SPTB(6710); PML(5371); CSNK1G1(53944); STRA6(64220); ACSBG1(23205); ABC |

TABLE 4-52

| | | |
|---|---|---|
| | | C1(4363);TNT(162083);GNAO1(2775);FLJ45121(400556); |
| | | CMTM4(146223);ARHGEF15(22899);ABCC3(8714);TBC1D16(125058); |
| | | C18orf1(753);SETBP1(26040);APC2(10297);FZR1(51343);PVR |
| | | (5817);PLAC2(257000);POFUT1(23509);DNAJC5(80331);PTPRT |
| | | (111.22);UBE2L3(7832);PSCD4(27128);FAM109B(150368); |
| | | FBLN1(2192);PPM1F(9647);LDOC1L(84247);C22orf9(23313); |
| hsa-miR-650 | 59;3449;536;537; | SAMD11(148398);C1orf188(148646);H6PD(9563);PEX14(5195); |
| | | LDLRAP1(26119);SESN2(83667);RBBP4(5928);C1orf21(81563); |
| | | PLEKHG5(57449);C1orf166(79594);RAP1GA1(5909);WASF2(10163); |
| | | SDC3(9672);THEM5(284486);PTPN7(5778);FLJ40869(348654); |
| | | NCOA1(8648);RIF1(55183);C2orf17(79137);TNS1(7145);LIMD1 |
| | | (8994);RBM15B(29890);SENP5(205564);ZNF445(353274); |
| | | LOC285382(285382);FLJ38991(285521);KIAA1909(153478); |
| | | SLC36A1(206358);IBRDC2(255488);FOXP4(116113);TTBK1(84630); |
| | | TREML2(79865);AGPAT4(56895);LOC401357(401367);INDOL1 |
| | | (169355);C8orf55(51337);KIF13B(23303);LYNX1(66004);C9orf47 |
| | | (286223);FREQ(23413);AKNA(80709);FAM102A(399665); |
| | | ZYG-11BL(10444);LHPP(64077);ACTR1A(10121);CRY2(1408); |
| | | PACS1(55690);FBXL11(22992);CBL(867);FLJ45300(399957); |
| | | TP53I11(9537);WNT1(7471);PFDN5(5204);HOXC12(3228);RBMS2 |
| | | (5939);NRIP2(83714);ARF3(377);FMNL3(91010);B4GALNT1 |
| | | (2583);CENTG1(116986);KIAA0247(9766);KIAA0125(9834);PML |
| | | (5371);UBE3A(7337);EHD4(30844);RAB40C(57799);GNAO1(2775); |
| | | CCL22(6367);MMP15(4324);RPUSD1(113000);EXOSC6(118460); |
| | | FA2H(79152);RAB11FIP4(84440);CNP(1267);METT10D(79066); |
| | | CAMTA2(23125);UNC13D(201294);FLJ45079(400624);SOCS3 |
| | | (9021);ARHGDIA(396);MAFG(4097);TCEB3C(162699);FZR1 |
| | | (51343);FEM1A(55527);SLC27A1(376497);KLHL26(55295); |
| | | KCTD15(79047);HNRPUL1(11100);BCAM(4059);APOE(348);ELL |
| | | (8178);AKT2(208);PTPRA(5786);CBFA2T2(9139);PPP1R16B |
| | | (26051);SIRPB1(10326);RASSF2(9770);RIMS4(140730);NF2 |
| | | (4771);APOBEC3F(200316);MAPK1(5594);TXN2(25828);NPTXR |
| | | (23467); |
| hsa-miR-654 | 60;3450;1461; | CLCN6(1185);EPHA8(2046);FDPS(2224);C1orf95(375057);MELL1 |
| | | (79258);KIF17(57576);HSPG2(3339);KIF21B(23046);GREB1 |
| | | (9687);GPC1(2817);PAX8(7849);KLHDC6(166348);CHRD(8646); |
| | | TMEM16K(55129); MGLL(11343);SH3BP2(6452);FLJ35725(152992); |
| | | SLC26A1(10861);LETM1(3954);KIAA0141(9812);FCHSD1(89848); |
| | | CAMK2A(815);PDLIM7(9260);C8orf55(51337);FRE Q(23413); |
| | | GRIN1(2902);FLJ20245(54863);PAPD1(55149);C11orf11(747); |
| | | RAB1B (81876);PELI3(246330);TP53I11(9537)FGF19(9965); |
| | | PVRL1(5818);TSPAN9(10867);NT5DC3(51559);MSI1(4440); |
| | | KIAA0247(9766);TRAF3(7187);KIAA0284(283638);TLN2(83660 |

TABLE 4-53

| | | |
|---|---|---|
| | | );ZNF609(23060);ALPK3(57538);DKFZp434I1020(196968);RAB40C |
| | | (57799);TRAF7(84231);LRRC50(123872);FLJ45121(400556); |
| | | C16orf55(124045);MGC24381(115939);ADCY9(115);FAM100A |
| | | (124402);CBFA2T3(863);LASP1(3927);NXPH3(11248);CBX2(84733); |
| | | raptor(57521);BAIAP2(10458);SLC43A2(124935);C1QL1(10882); |
| | | PLCD3(113026);PLEKHM1(9842);TBC1D16(125058);MAP2K7(5609); |
| | | F2RL3(9002);DIRAS1(148252);PIP5K1C(23396);PRX(57716); |
| | | ZGPAT(84619);PLAGL2(5326);ZHX3(23051);HRH3(11255);COL6A2 |
| | | (1292);LIF(3976);KIAA1904(114794);CXorf36(79742);HCFC1 |
| | | (3054);MECP2(4204); |
| hsa-miR-658 | 61; | SAMD11(148398);H6PD(9563);NES(10763);C11orf17(56672); |
| | | ANGEL2(90806);DPYSL5(56896);ATP6V1B1(525);LIMS2(55679); |
| | | WDR33(55339);PLXNA1(5361);RAP2B(5912);BDH1(622);SERF1A |
| | | (8293);PCDHB11(56125);FLJ33360(401172);FOXK1(221937); |
| | | ADCY1(107);LIMK1(3984);CYCS(54205);PMS2L2(5380);ATG9B |
| | | (285973);DPY19L4(286148);FGD3(89846);C9orf28(89853); |
| | | LOC613206(613206);FNBP1(23048);LOC399706(399706);NKX2-3 |
| | | (159296);ADARB2(105);GALNAC4S-6ST(51363);NRGN(4900); |
| | | CHID1(66005);PHOX2A(401);CDON(50937);LRRC23(10233); |
| | | HOXC12(3228);NUDT4(11163);HSP90B1(7184);RAD52(5893); |
| | | KRT3(3850);C12orf47(51275);EPSTI1(94240);TRIM9(114088); |
| | | C15orf37(283687);LRRK1(79705);MGRN1(23295);SPN(6693); |
| | | FBXL16(146330);EXOSC6(118460);MGC3101(79007);GOSR1(9527); |
| | | CNTNAP1(8506);BAIAP2(10458);NXN(64359);DULLARD(23399); |
| | | C1QL1(10882);LOC641522(641522);TBC1D16(125058);EMILIN2 |
| | | (84034);GRIN3B(116444);MIDN(90007);RAB11B(9230);ATG4D |
| | | (84971);KLHL26(55295);UPK1A(11045);BCAM(4059);APOE |
| | | (348);HIF3A(64344);ZNF528(84436);FLJ45684(400666);C19orf6 |
| | | (91304);PIP5K1C(23396);DAPK3(1613);CABP5(56344);SLC24A3 |
| | | (57419);TGIF2(60436);STK4(6789);SCRT2(85508);JAM2(58494); |
| | | COL6A2(1292);C21orf6(10069);NF2(4771);RASD2(23551); |
| | | GTPBP1(9567);SHOX(6473);LOC203547(203547);F8A1(8263); |
| | | ARSD(414); |
| hsa-miR-660 | 62;538;539;540; | LIN28(79727);KIAA1522(57648);PRKAA2(5563);RAVER2(55225); |
| | | PPFIA4(8497);PFKFB2(5208);FBXO28(23219);PRKAB2(5565); |
| | | MEF2D(4209);FAM78B(149297);NUCKS1(64710);IRF6(3664); |
| | | RAB3GAP2(25782);HNRPU(3192);GRHL1(29841);C2orf13(200558); |
| | | FLJ20758(55037);ITGAV(3685);ALS2CR13(150864);FLJ44006 |
| | | (400997);WDR83(55339);IGFBP5(3488);ARL4C(10123);KCNH8 |
| | | (131096);KBTBD8(84541);LRRIQ2(79598);F7CO1(79443); |
| | | 7BTB11(27107);MGC40579(256356);LARP2(55132);WWC2(80014); |
| | | LOC90355(90355);WDR36(134430);KIF3A(11127);RPS14(6208); |
| | | MDGA1(266727);CDIC5(53405);PGM3(5238);SYNCRIP(10 |

TABLE 4-54

| | | |
|---|---|---|
| | | 492);ZNRF2(223082);LMTK2(22853);ETV1(2115);DGKB(1607); |
| | | PMS2L2(5380);HIP1(3092);NRCAM(4897);VPS13B(157680);WISP1 |
| | | (8840);ZNF623(9831);NKX3-1(4824);IMPAD1(54928);JPH1 |
| | | (56704);ZNF706(51123);PALM2(114299);GPR107(57720);TRAF1 |
| | | (7185);PAPD1(55149);SH3PXD2A(9644);RAB30(27314);WNK1 |
| | | (65126);IRAK4(51135);KIAA1853(84530);FAM60A(58516);KIAA0701 |
| | | (23074);LOC283537(283537);NPAS3(64067);CALM1(801); |
| | | TRIM9(114088);ALPK3(57538);IQGAP1(8826);PRTG(283659); |
| | | AYTL1(54947);MAF(4094)ZNF207(7756);GOSR2(9570);KCNJ2 |
| | | (3759);METT10D(79066);DOK6(220164);ZNF480(147657); |
| | | LOC390980(390980);KIAA1559(57677);SFRS6(6431);RAB22A(57403); |
| | | STX16(8675);HAO1(54363);SON(6651);APOBEC3F(200316); |
| | | KIAA1904(114794);PRRG1(5638);AFF2(2334);WNK3(65267); |
| | | RNF12(51132);RP13-383K5.1(55285); |
| hsa-miR-668 | 68;541;542; | KCNAB2(8514);RAVER2(55225);AK3L1(205);FAM73A(374986); |
| | | PTGFRN(5738);PEA15(8682);RGSL1(353299);MELL1(79258); |
| | | RPL22(6146);GPR153(387509);C1orf126(200197);PLA2G2D(26279); |
| | | KIAA0319L(79932);GPR161(23432);PELI1(57162);USP37 |
| | | (57695);HEMK1(51409);CLASP2(23122);C3orf62(375341);TM4SF1 |
| | | (4071);WHSC1(7468);STOX2(56977);LETM1(3954);CCDC4(389206); |
| | | GNRHR(2798);RHOBTB3(22836);SYNPO(11346);SLC12A7 |
| | | (10723);LIFR(3977);FSTL4(23105);TRIM7(81786);LRRC1 |
| | | (55227);C6orf71(389434);TREML2(79865);AMZ1(155185);LEP |
| | | (3952);ZNF12(7559);SCAP2(8935);HIP1(3092);KIAA0738(9747); |
| | | ZNF705CP(389631);RHOBTB2(23221);TNFRSF10C(8794);SLC25A37 |
| | | (51312);CCDC25(56246);ST3GAL1(6482);C9orf47(286223); |
| | | PTGS1(5742);TRIM14(9830);ZNF37A(7587);NCOA4(8031);MKI67 |
| | | (4288);DIP2B(57609);GALNT9(50614);CHFR(55743);MGC9850 |
| | | (219404);TCL6(27004);KIAA0125(9834);ARNT2(9915);NFATC2IP |
| | | (84901);GNAO1(2775);HSD11B2(3291);XYLT1(64131);USP31 |
| | | (57478);Pfs2(51659);COX4NB(10328);KIAA0523(23302); |
| | | YPEL2(388403);DULLARD(23399);PPARBP(5469);BRCA1(672); |
| | | GNAL(2774);CNDP2(55748);C18orf45(85019);RAB8A(4218); |
| | | GNG7(2788);C19orf31(404664);BTBD3(22903);KIAA1219(57148); |
| | | GGTL3(2686);ZHX3(23051);PTPRT(11122);CHRNA4(1137);PDXK |
| | | (8566);YPEL1(29799);POLR3H(171568);SBF1(6305);MGC39900 |
| | | (286627);RBMX(27316); |
| hsa-miR-675 | 64;3451;543; | PLK3(1263);C1orf86(199990);FAM84A(151354);LYCAT(253558); |
| | | SFTPB(6439);OGG1(4968);PCDHB9(56127);SLC22A7(10864); |
| | | LOC441177(441177);LOC441179(441179);FRMD1(79981);TTYH3 |
| | | (80727);MYO1G(64005);ZFP41(286128);GLIS3(169792);SEMA4D |
| | | (10507);TRIM14(9830);FNBP1(23048);BRSK2(9024);TXNDC14 |
| | | (51075);H2AFX(3014);ATP8A2(51761);ATP11A(23250); |

TABLE 4-55

| | | |
|---|---|---|
| | | KIAA0329(9895);C14orf43(91748);BCL11B(64919);CRAMP1L |
| | | (57585);TBL3(10607);LOC348180(348180);RPL13(6137);FBXL16 |
| | | (146330);HIC1(3090);GAS7(8522);NRTN(4902);F2RL3(9002); |
| | | GATAD2A(54815);OPA3(80207);DIDO1(11083);GTPBP1(9567); |
| | | hCAP-H2(29781);SLC6A8(6535);ABL1(25);ACO1(48);ACTN4(81); |
| | | ADRBK2(157);ALDH3B1(221);ALDH3B2(222);APBA2(321);AQP8 |
| | | (343);ABCC6(368);ARHGAP6(395);ASCL2(430);ATP2B4(493); |
| | | ATP5A1(498);AZU1(566);BAG1(573);BAI1(575);BGN(633);C2 |
| | | (717);C21orf2(755);MPPED1(758);CA6(765);CAMK2B(816); |
| | | CAMK2G(818);CAPS(828);RUNX1(861);CD3Z(919);CDC34(997); |
| | | CDH4(1002);CHRNB2(1141);CNTFR(1271);COPB(1315);CRYAA |
| | | (1409);CYP51A1(1595);DLG4(1742);DRD2(1813);DUSP8(1850); |
| | | E4F1(1877);EEF1A2(1917);EFNB2(1948);EGFL4(1954);EIF2B1 |
| | | (1967);EPB41L2(2037);ERF(2077);EZH1(2145);F2R(2149); |
| | | FANCA(2175);FGD1(2245);FKBP4(2288);FOKF1(2294);FUT6(2528); |
| | | G6PC(2538);GALNT2(2590);GAPDH(2597);GAS6(2621);GAS8 |
| | | (2622);GATA2(2624);GBX2(2637);G1PR(2696);GNAI3(2773); |
| hsa-miR-765 | 65;544; | PIK3CD(5293);ARID1A(8289);CDCA8(55143);C1orf60(65123); |
| | | ZBTB7B(51043);LMNA(4000);PKP1(5317);NAV1(89796);PRELP |
| | | (5549);WNT3A(89780);TNFRSF14(8764);PLEKHG5(57449);SLC9A1 |
| | | (6548);HEYL(26508);RIMS3(9783);C1orf183(55924);TMEM63A |
| | | (9725);SOX11(6664);SIX3(6496);CNNM4(26504);CTDSP1 |
| | | (58190);DNAJB2(3300);DGKD(8527);CYP26B1(56603);CYP8B1 |
| | | (1582);MGC4618(84286);N4BP3(23138);ADAM19(8728);PACSIN1 |
| | | (29993);CREB5(9586);ACTR3B(57180);EN2(2020);MGC11257 |
| | | (84310);ZNF703(80139);TNFRSFI0B(8795);NIBP(83696);NRBP2 |
| | | (340371)FOXH1(8928);C9orf47(286223);FGD3(89846);GPR107 |
| | | (57720);FLJ46082(389799);ENTPD2(954);LOC401565(401565); |
| | | SEC61A2(55176);PAX2(5076);CNNM2(54805);LHPP(64077); |
| | | CXCL12(6387);KIAA0652(9776);IGHMBP2(3508);TAGLN(6876); |
| | | ABCG4(64137);LRP4(4038);SLC15A3(51296);RAB30(27314); |
| | | FLJ20489(55652);KIF5A(3798);RPH3A(22895);LOC144501(144501); |
| | | FLJ40296(122183);EFNB2(1948);KIAA0125(9834);SPTB(6710); |
| | | LOC400968(400968);C15orf43(145645);PML(5371)ISLR2(57611); |
| | | SCAMP5(192683);TLE3(7090);DKFZp434I1020(196968); |
| | | RAB40C(57799);BAIAP3(8938);NDE1(54820);PRRT2(112476); |
| | | PDPR(55066);KIAA0513(9764);FLJ10815(55238);NDEL1(81565); |
| | | RAB11FIP4(84440);THRA(7067);VAMP2(6844);NR1D1(9572); |
| | | EZH1(2145);HDAC5(10014);TBC1D16(125058);SEH1L(81929); |
| | | RNF165(494470);ZADH2(284273);MIDN(90007);PDE4A(5141); |
| | | DNM2(1785);NFIX(4784);SIPA1L3(23094);SAMD4B(55095); |
| | | CBLC(23624);HIF3A(64344);CACNG7(59284);ZNF444(55311); |
| | | ANGPTL6(83854);RAVER1(125950);HAPLN4(404037);POU2F2(54 |

TABLE 4-56

| | | |
|---|---|---|
| | | 52);NOVA2(4858);KLK4(9622);OSCAR(126014);HNF4A(3172); |
| | | PTPRT(11122);RIMS4(140730);TNRC6B(23112);POLR3H(171568); |
| | | KCND1(3750); |
| hsa-miR-766 | 66; | C1orf188(148646);MFN2(9927);SLC25A34(284723);PQLC2(54896); |
| | | EPHA8(2046);C1orf60(65123);NAV1(89796);C1orf69(200205); |
| | | LUZP1(7798);TTMB(399474);SDC3(9672);LOC113444(113444); |
| | | CLCC1(23155);TPM3(7170);GBA(2629);F11R(50848);SYT2 |
| | | (127833);GREB1(9687);C2orf17(79137);ANKZF1(55139);TMEM127 |
| | | (55654);ANKRD23(200539);PGAP1(80055);MOBP(4336);HEMK1 |
| | | (51409);FBXO40(51725);KLHDC6(166348);SENP5(205564); |
| | | MAP4(4134);MINA(84864);KIAA2018(205717);ZNF9(7555); |
| | | MCF2L2(23101);LRRC15(131578);ZNF141(7700);WHSC1(7468); |
| | | SH3BP2(6452);TMEM33(55161);KIAA1712(80817);WWC2(80014); |
| | | DUX4(22947);DKFZp761B107(91050);FLJ38991(285521); |
| | | LOC152485(152485);FLJ38482(201931);WDR55(54853);PCDHB13 |
| | | (56123);LMAN2(10960);SIRT5(23408);TAPBP(6892);AMZ1 |
| | | (155185);FOXK1(221937);WIPI2(26100);ZNRF2(223082);LIMK1 |
| | | (3984);ARHGEF5(7984);LOC155060(155060);SNX8(29886); |
| | | TMED4(222068);MGC5242(78996);XRCC2(7516);CLN8(2055); |
| | | KIAA1875(340390);LZTS1(11178);FGFR1(2260);TPD52L3(89882); |
| | | NTRK2(4915);C9orf47(286223);DAB2IP(153090);TOR1B(27348); |
| | | GPR107(57720);FREQ(23413);SEMA4D(10507);FBXW2(26190); |
| | | TOR2A(27433);FAM102A(399665);ASB6(140459);SURF5(6837); |
| | | EIF4EBP2(1979);SEC24C(9632);RPP30(10566);KAZALD1(81621); |
| | | ADARB2(105);MAT1A(4143);HPS1(3257);RPL27A(6157); |
| | | LRRC51(220074);TAGLN(6876);CBL(867);ADAMTS15(170689); |
| | | CD59(966);ARHGAP1(392);FKBP4(2288);RBMS2(5939);MARCH9 |
| | | (92979);CBX5(23468);SLC24A6(80024);C12orf43(64897); |
| | | RNF31(55072);EXDL2(55218);AMN(81693);TM9SF1(10548);SOS2 |
| | | (6655);RAB15(376267);GPR132(29933);SNURF(8926);RTF1 |
| | | (23168);EIF3S1(8669);ZNF609(23060);IL16(3603);FLJ40113 |
| | | (374650);ST8SIA2(8128);FLJ38723(255180);FLJ22795(80154); |
| | | C15orf38(348110);RAB40C(57799);MGC2654(79091);EEF2K(29904); |
| | | SPN(6693);PRRT2(112476);CCL22(6367);KIAA0513(9764);C16orf5 |
| | | (29965);GSPT1(2935);GGA2(23062);FLJ32130(146540);EXOSC6 |
| | | (118460);LLGL1(3996);ZNHIT3(9326);PNPO(55163);NIXPH3 |
| | | (11248);ANAPC11(51529);METT10D(79066);ALOX15(246);CXCL16 |
| | | (58191);LOC162427(162427);FLJ45079(400624);TMC6(11322); |
| | | PCYT2(5833);DUS1L(64118);EMILIN2(84034);APC2(10297); |
| | | ILF3(3609);KCTD15(79047);APOE(348);GIPR(2696);HIF3A |
| | | (64344);DHX34(9704);ACPT(93650);FCAR(2204);LOC390980 |
| | | (390980);HKR2(342945);C19orf19(284451);FLJ45684(400666); |
| | | ZNF490(67474);EMR2(30817);SF4(57794);FLJ36445(163183);CAR |

TABLE 4-57

| | | D8(22900);A1BG(1);POFUT1(23509);SLC12A5(57468);VAPB(9217); |
|---|---|---|
| | | ZHX3(23051);PREX1(57580);BTBD4(140685);PDXK(8666); |
| | | TMEM50B(757);DSCR3(10311);POLR2F(5435);SYNGR1(9145); |
| | | FBLN1(2192);DGCR2(9993);CBX6(23466);ECGF1(1890);LOC440836 |
| | | (440836);INE1(8552);LOC203547(203547);TRAPPC2(6399); |
| | | MECP2(4204); |
| hsa-miR-194 | 67;545;546;547;548; | RBBP4(5928);CTTNBP2NL(55917);POGK(57645);XPR1(9213); |
| | 549;550;551;552;553; | PFKFB2(5208);DISC1(27185);PPT1(5538);SLC2A1(6513);RAB3B |
| | 554;555;3452;556;557; | (5865);TMED5(50999);C1orf24(116496);ITPKB(3707);MKD1 |
| | 558; | (4084);EPC2(26122);BMPR2(659);MAP2(4133);OACT2(129642); |
| | | ALS2CR15(130026);COL4A4(1286);TRIP12(9320);NR1D2(9975); |
| | | TRAK1(22906);ZNF660(285349);APPL(26060);MITF(4286); |
| | | ACAD9(28976);PIK3CA(5290);ANKRD28(23243);SLC6A20(54716); |
| | | DCBLD2(131566);IGSF11(152404);HIP2(3093);DCUN1D4(23142); |
| | | SEPT11(55752);PHF17(79960);GAB1(2549);GUCY1B3(2983); |
| | | SLC7A11(23657);FAM105B(90268);MCCC2(64087);PCDHGB4 |
| | | (8641);GM2A(2760);NSD1(64324);RICTOR(253260);HBEGF |
| | | (1839);DPYSL3(1809);CSNK1A1(1452);CD2AP(23607);SLC35F1 |
| | | (1222553);QKI(9444);SERPINB1(1992);CNR1(1268);TMEM106B |
| | | (154664);ZNRF2(223082);ADAM22(53616);FLJ21986(79974); |
| | | CNTNAP2(26047);MMD2(221938);SCRN1(9805);HIP1(3092);KRIT1 |
| | | (889);CDK6(1021);MLL3(58508);TUSC3(7991);AP3M2(10947); |
| | | SLC30A8(169026);STAU2(27067);FOXE1(2304);ANKS6(203286); |
| | | FBXW2(26190);CAMSAP1(157922);SFTPA1(6435);SUFU(51684); |
| | | CASP7(840);CASC2(255082);C1orf39(282973);RP11-142I17.1 |
| | | (26095);TMEM26(219623);HERC4(26091);TEAD1(7003);GPLAP1 |
| | | (4076);ZFP91(80829);TRAPPC4(51399);SPTY2D1(144108); |
| | | SLC1A2(6506);TRAF6(7189);ARHGAP1(392);GRM5(2915); |
| | | MTMR2(8898);CCND2(894);PPFIBP1(8496);RBMS2(5939);SUDS3 |
| | | (64426);ATP6V0A2(23545);JARID1A(5927);KIAA0286(23306); |
| | | FLJ40142(400073);ATP8A2(51761);RP11-367C11.1(145173); |
| | | KLF12(11278);TBC1D4(9882);EFNB2(1948);KIAA0323(23351); |
| | | KIAA1737(85457);CFL2(1073);BTBD7(55727);IGF1R(3480);ZFP106 |
| | | (64397);BNIP2(663);CALML4(91860);STARD5(80765);BNC1(646); |
| | | WDR73(84942);SLC7A6(9057);KIAA0174(9798);ZNF694(342357); |
| | | HSA277841(55421);ANKFY1(51479);KRT13(3860);LOC641522 |
| | | (641522);CEP192(55125);ZADH2(284273);CSPG3(1463); |
| | | ZNF71(58491);ZNF585A(199704);C20orf77(58490);TPD52L2(7165); |
| | | NDRG3(57446);PTGIS(5740);ADNP(23394);LIMK2(3985);NUP50 |
| | | (10762);MAPK1(5594);ZNF70(7621);PCDH11X(27328);FMR1 |
| | | (2332);LOC203547(203547);F8A1(8263);RNF12(51132);PCDH11Y |
| | | (83259); |
| hsa-miR-500 | 68;559; | RP13-15M17.2(199953);KIF1B(23095);FBXO44(93611);PLA2G |

TABLE 4-58

| | | |
|---|---|---|
| | | 2F(64600);TXLNA(200081);KIAA1522(57648);LPPR4(9890); |
| | | VANGL1(81839);PPP1R12B(4660);C1orf69(200205);DISC1(27185); |
| | | MELL1(79258);TNFRSF9(3604);LUZP1(7798);MTF1(4520);FOXJ3 |
| | | (22887);SLC6A9(6536);RIPK5(25778);ERO1LB(56605);ZNF496 |
| | | (84838);CASP10(843);PIP5K3(200576);C2orf21(285175); |
| | | C2orf19(394261);MKRN2(23609);SLC6A6(6533);ABHD6(57406); |
| | | MME(4311);CHRD(8646);TBC1D14(57533);TMPRSS11E(28983); |
| | | KIAA1727(85462);SLC25A4(291);PPEF2(5470);DKFZp686L1814 |
| | | (132660);FAM105B(90268);GRAMD3(65983);LOC90624(90624); |
| | | SLC36A1(206358);GRIA1(2890);HMGCS1(3157);KENAE(202243); |
| | | ALDH7A1(501);MGAT1(4245);ABT1(29777);C6orf71(3894334); |
| | | QKI(9444);LOC441179(441179);MOCS1(4337);TRAM2(9697); |
| | | GLCCI1(113263);ZNRF2(223082);EGFR(1956);SP8(221833); |
| | | NUDCD3(23386);LOC401357(401357);CDK6(1021);LY6K(54742); |
| | | FGFR1(2260);ZNF704(619279);C9orf47(286223);APBA1(320); |
| | | GOLGA2(2801);WDR37(22884);HSPA14(51182);RAI17(57178); |
| | | KIAA1128(54462);C10orf39(282973);ITIH5(80760);C10orf54 |
| | | (64115);POLR3A(11128);SYT8(90019);INCENP(3619);TAGLN(6876); |
| | | CD59(966);NDUFC2(4718);LOC283174(283174);ATF7IP(55729); |
| | | LRRIQ1(84125);BRI3BP(140707);SLC2A14(144195);SLC2A3 |
| | | (6515);SLC38A1(81539);CIT(11113);SBNO1(55206);ATP8A2 |
| | | (51761);TCL6(27004);KIAA0125(9834);MDP-1(145553);ANKRD9 |
| | | (1212416);FLJ38723(255180);CSNK1G1(53944);NRG4(145957); |
| | | KIAA1920(114817);KIAA1924(197335);KIAA0513(9764);LOC440350 |
| | | (440350);RABEP2(79874);PDF(64146);ZNF207(7756);ABCC3 |
| | | (8714);PRR11(55771);LLGL2(3993);SEPT9(10801);PLXDC1(57125); |
| | | ZNF652(22834);MBTD1(54799);SUMO2(6613);PCYT2(5833); |
| | | PMAIP1(5366);PPP4R1(9989);FAM59A(64762);MBD2(8932); |
| | | CDH19(28513);CIRBP(1153);FZR1(51343);FL343870(400686); |
| | | PVR(5817);ZNF549(256051);PRX(57716);POFUT1(23509);C20orf43 |
| | | (51507);CD93(22918);SLA2(84174);B4GALT5(9334);BTBD4 |
| | | (140685);RGS19(10287);PDXK(8566);C21orf24(400866);RIPK4 |
| | | (54101);ICOSLG(23308);POFUT2(23275);ASPHD2(57168); |
| | | LOC400924(400924);TCN2(6948);TNRC6B(23112);FBLN1(2192); |
| | | TPST2(8459);KIAA1904(114794);ECGF1(1890);STS(412);RP2 |
| | | (6102);TMEM28(27112);DLG3(1741);MECP2(4204);PRKY(5616); |
| hsa-miR-197 | 69;560;561;562;563; | THAP3(90326);ZBTB40(9923);EPB41(2035);ZYG11B(79699); |
| | 564;565;566;567; | C1orf171(127253);CYB561D1(284613);CD53(963);PTGFRN(5738); |
| | | KIAA0495(57212);FBXO42(54455);STK40(83931);C1orf149(64769); |
| | | RIMS3(9783);MEF2D(4209);KIAA0040(9674);SUSD4(55061); |
| | | TMEM63A(9725);TAF5L(27097);PGBD5(79605);SOX11(6664); |
| | | GREB1(9687);SELI(85465);ANTXR1(84168);SMYD5(10322); |
| | | SULT1C2(27233);ASB1(51665);KIAA1212(55704);FLJ14816(849 |

TABLE 4-59

| | | |
|---|---|---|
| | | 31);GPR155(151556);NR2C2(7182);EAF1(85403);FBXO40(51725); |
| | | NUDT16(131870);BPESC1(60467);CHRD(8646);PRKAR2A(576); |
| | | LRIG1(26018);GOLGB1(2804);SH3BP2(6452);DGKQ(1609); |
| | | KIAA1909(153478);FAM105B(90268);LOC90624(90624);ETF1 |
| | | (2107);LRRTM2(26045);GRM6(2916);FOXO3A(2309);ESR1(2099); |
| | | RP11-145H9.1(340156);ATXN1(6310);SYNCRIP(10492);HBS1L |
| | | (10767);DEADC1(134637);AMZ1(155185);FOXK1(221937); |
| | | RBM33(155435);H2AFV(94239);UBE2H(7328);DLGAP2(9228); |
| | | FZD3(7976);TRIM35(23087);REXO1L1(254958);MGC21881 |
| | | (389741);C9orf47(286223);SYK(6850),GRIN3A(116443);FBXW2 |
| | | (26190);TSPAN14(81619);PCDH21(92211);CEP55(55165);ENTPD7 |
| | | (57089);DIP2C(22982);ANKRD16(54522);HERC4(26091);KCNMA1 |
| | | (3778);SLC16Al2(387700);ARHGAP19(84986);KIAA1914 |
| | | (84632);IGF2AS(51214);GPIAP1(4076);STX3A(6809);RBM14 |
| | | (10432);C11orf1(64776);CBL(867);TERG1(84897);TH(7054);TRAF6 |
| | | (7189);FLJ32675(283254);GAB2(9846);GPR83(10888);ASAM(79827); |
| | | B3GAT1(27087);EMG1(10436);DDX11(1663);CORO1C(23603); |
| | | GPR81(27198);VPS36(51028);ACTBL1(23784);BRMS1L(84312); |
| | | CPSF2(53981);TM9SF1(10548);ZDHHC22(283576);RTF1(23168); |
| | | TPM1(7168);SNX22(79856);SCAND2(54581);CALML4(91860); |
| | | PTPN9(5780);TSPAN3(10099);FLJ22795(80154);AP3S2(10239); |
| | | C15orf38(348110);PDPK1(5170);MGRN1(23295);CYLD(1540); |
| | | NDRG4(65009);KIAA0174(9798);RPL13(6137);SMG1(23049); |
| | | USP31(57478);CMTM4(146223);KIAA0672(9912);LASP1(3927); |
| | | STXBP4(252983);DYNLL2(140735);YPEL2(388403);FLJ35220 |
| | | (284131);FLJ135767(400629);FLJ36492(284047);BRCA1(672); |
| | | TRIM25(7706);SMURF2(64750);TMC6(11322);SGSH(6448); |
| | | FLJ46026(400627);LOC284434(284434);LRP3(4037);EHD2(30846); |
| | | ZNF264(9422);SLC35E1(79939);CAPN12(147968);OPA3(80207); |
| | | ZNF160(90338);C20orf121(79183);DNAJC5(80331);GGTL3(2686); |
| | | C20orf117(140710);JAM2(58494);HUNK(30811);SLC5A3(6526); |
| | | ADAMTS5(11096);POFUT2(23275);LOC400891(400891);HIC2 |
| | | (23119);APOL6(80830);SYNGR1(9145);FLJ21125(79680);WNT7B |
| | | (7477);RP1-29C18.7(348645);SUV39H1(6839);DDX26B(203522); |
| | | ZIC3(7547);RP13-383K5.1(55285); |
| hsa-miR-221 | 70;568;569;570; | CAMTA1(23261);PRDM2(7799);NBPF3(84224);NSUN4(387338); |
| | 571;572;573;574; | MTZL1(9019);DNM3(26052);NAV1(89796);FBXO28(23219); |
| | 575;576;577;578; | RIMS3(9783);SORT1(6272);MTB41(360023);ENAH(55740); |
| | 579;580;581; | SPTBN1(6711);MGC5509(79074);ACTR3(10096);HRB(3267);KIAA1212 |
| | | (55704);FLJ16008(339761);ARL5A(26225);CAPN7(23473); |
| | | STAC(6769);ITGA9(3680);KLHL18(23276);ILI7RB(55540);TFG |
| | | (10342);AADAC(13);CLDN11(5010);VGLL4(9686);SLC4A7(9497); |
| | | PRKAR2A(5576);AER61(285203);SNX4(8723);C4orf12(404201); |

TABLE 4-60

| | | |
|---|---|---|
| | | UGT2B15(7366);NAP1L5(266812);MARVELD2(153562);MFAP3 |
| | | (4238);GABRA1(2554);C6(729);PLCXD3(345557);PANK3(79646); |
| | | C6orf151(154007);RBM24(221662);ZNF192(7745);HLA-DQA1 |
| | | (3117);RP11-145H9.1(340156);ATXN1(6310);TRAM2(9697); |
| | | OSTM1(28962);CDC2L6(23097);HBS1L(10767);EGFR(1956); |
| | | ADAM22(53616);ZNF655(79027);IFRD1(3475);OSBPL3(26031); |
| | | SCAP2(8935);GRB10(2887);KSTBD11(9920);LRRCC1(85444)ZNF704 |
| | | (619279);TRIM14(9830);RAB18(22931);SAMD8(142891);FAM35A |
| | | (54537);HECTD2(143279);ENTPD7(57089);DNMT2(1787); |
| | | CXCL12(6387);MARCH8(220972);CPEB3(22849);ZFP9(80829); |
| | | MLL(4297);PDGFD(80310);CDKN1B(1027);PLXNC1(10154); |
| | | CUTL2(23316);FL346363(400002);C13orf10(64062);SOCS4 |
| | | (122809);KTN1(3895);RGS6(9628);THBS1(7057);TCF12(6938); |
| | | NIPA1(123606);RFXDC2(64864);CP110(9738);SBK1(388228); |
| | | MIS12(79003);NXN(64359);AXIN2(8313);FVT1(2531);ZADH2 |
| | | (284273);ZNF181(339318);VAPB(9217);DYRK1A(1859);CRKL |
| | | (1399);LOC401620(401620);AMMECR1(9949);CLIC2(1193); |
| hsa-let-7e | 71;582;583;584;585;586; | XKR8(55113);FLJ25476(149076);SLC5A9(200010);DCLRE1B |
| | 587;3453;588;589;590;591; | (64858);LMNA(4000);FMO2(2327);ICMT(23463);E2F2(1870); |
| | 592;593;594;595;596;597; | PTAFR(5724);BSDC1(55108);ATPAF1(64756);GDAP2(54834);ENSA |
| | 598;599;600;601;602;603; | (2029);MEF2D(4209);PTPN7(5778);PPP1R15B(84919);YOD1 |
| | 604;605;606;607;608;609; | (5432);ENAH(55740);ACP1(52);BZW1(9689);ANKZF1(55139); |
| | 610;611;612;613;614;615; | HDLBP(3069);LIN41(131405);2′PDE(201626);CDC25A(993); |
| | 616;617;618;619;620;621; | SFMBT1(51460);TXNDC6(347736);ABCC5(10057);MASP1(5648); |
| | 622;623;624;625;626;627; | MUC4(4585);RUFY3(22902);SMARCAD1(56916);BBS7(55212); |
| | 628;629;630;631;632;633; | LOC285636(285636);LOC493869(493869);PRLR(5618);PLCXD3 |
| | 634;635;636;637;638;639; | (345557);FCHSD1(89848);C6orf141(135398);LIN28B(389421); |
| | 640;641;642;643;644;645; | SERPINB9(5272);PSORS1C2(170680);PXT1(222659);C6orf148 |
| | 646;647;648;649;650;651; | (80759);AP1S1(1174);MLL5(55904);MKLN1(4289);HOXA1(3198); |
| | 652;653;654;655;656;657; | LOC401357(401357);ZC3HAV1(56829);ATP6V1C1(528);TSPYL5 |
| | 658;659;660;661;662;663; | (85453);FAM84B(157638);DAPK1(1612);PAPPA(5069);FBXW2 |
| | 664;665;666;667;668;1462; | (26190);MGC61598(441478);WDR37(22884);HSPA14(51182); |
| | 1463;1464;1465;1466;1467; | C10orf6(55719);ZNF248(57209);TSPAN18(90139);RPS6KB2 |
| | 1468;1469;1470;1471;1472; | (6199);THRSP(7069);CBL(867);ADAMTS15(170689);KCNJ11 |
| | 1473;1474;1475;1476;1477; | (3767);CD59(966);LOC283219(283219);GAB2(9846);SCN4B(6330); |
| | 1478;1479;1480; | LOC283174(283174);HMGA2(8091);ZNF641(121274);LOC40172 |
| | | (401720);CBX5(23468);FLJ46358(400110);KATNAL1(84056); |
| | | AKAP6(9472);C14orf28(122525);SOCS4(122809);TM9SF1(10548); |
| | | RAB15(376267);LOC440295(440295);SCAND2(54581);ISG20L1 |
| | | (64782);PLCB2(5330);PRTG(283659);PUNC(9543);HSPC065 |
| | | (29070);PRSS22(64063); GGA2(23062);RBM35B(80004); |
| | | RAB11FIP4(84440);LASP1(3927);STARD3(10948);IGF2BP1(10642); |
| | | PLSCR3(57048);GAS7(8522);CCL3L3(414062);LIMD2(80774);RNM |

TABLE 4-61

| | | |
|---|---|---|
| | | T(8731);MIB1(57534);MBD2(8932);TNFAIP8L1(126282);TUBB4 |
| | | (10382);OPA3(80207);MEIS3(56917);FLJ10922(55260);A1BG |
| | | (1);RALY(22913);PARD6B(84612);GGTL3(2686);GM632(57473); |
| | | BACH1(571);TRPM2(7226);TMPRSS2(7113);HIC2(23119);SUHW2 |
| | | (140883);ZNF70(7621);DIAPH2(1730);SMC1L1(8243)DCX |
| | | (1641);AMOT(154796);LAMP2(3920); |
| hsa-miR-1 | 72;669;670;671;672; | KIAA0467(23334);C1orf171(127253);LPPR4(9890);PROK1 |
| hsa-miR-206 | 673;674;675;676;3454; | (84432);HIPK1(204851);S100A7L1(338324);PEA15(8682);UHMK1 |
| hsa-miR-613 | 677;678;679;680;73; | (127933);C1orf95(375057);C1orf150(148823);MTHFR(4524); |
| | 681;682;683;684;685; | NBPF4(148545);NOTCH2(4853);CDC42SE1(56882);TAGLN2(8407); |
| | 686;687;688;689;690; | C1orf140(400804);KCNIP3(30818);IL1R1(3554);HNRPA3 |
| | 74; | (220988);FLJ38973(205327);MGAT4A(11320);LOC151194(151194); |
| | | PAX3(5077);TRAK1(22906);PTPRG(5793);RAP2B(5912);SEC22L3 |
| | | (9117);FOXP1(27086);CBLB(868);TMEM89A(55254);FSTL1 |
| | | (11167);RAB43(339122);TMCC1(23023);COMMD2(51122);ABCC5 |
| | | (10057);LOC285882(285382);PGM2(55276);CYP2U1(113612); |
| | | TRIM2(23321);ZNF721(170960);C4orf13(84068)LOC90826(90826); |
| | | LOC285636(285686);RNUXA(51808);KCTD16(57528);GABRP |
| | | (2568);CPLX2(10814);ANKH(56172);HSA9761(27292);LIX1 |
| | | (167410);ACSL6(23305);STC2(8614);DOK3(79930);ADAMTS2(9509); |
| | | RNF8(9025);GJA1(2697);UST(10090);SERPINB9(5272);TPMT |
| | | (7172);BACH2(60468);GLCCI1(113263);INMT(11185);ADCY1 |
| | | (107);STEAP2(261729);PFTK1(5218);MET(4233);FLJ21986 |
| | | (79974);CNTNAP2(26047);MMD2(221938);PMS2(5395);ELMO1 |
| | | (9844);TNS3(64759);GATS(352954);TFEC(22797);SLC3584(84912); |
| | | SULF1(23213);E2F5(1875);ATP6V1C1(528);FAM83A(84985); |
| | | ZFP41(286128);WHSC1L1(54904);TPD52L3(89882);ASAH3L |
| | | (340485);MGC21881(389741);SLC44A1(23446);PTPLAD2(401494); |
| | | FRMD3(257019);C9orf152(401546);CAMSAP1(157922);FAM35A |
| | | (54537);TNKS2(80351);C10orf26(54838);C10orf39(282973); |
| | | C10orf31(414196);TMEM10(93377);OAT(4942);SPRN(503542); |
| | | MS4A1(931);UBE4A(9354);ARCN1(372);SIRT3(23410);RIC3 |
| | | (79608);BDNF(627);SHANK2(22941);CCND2(894);LOC144363 |
| | | (144363);KLHDC5(57542);MSRB3(253827);OAS2(4989);KIAA1858 |
| | | (84530);BRI3BP(140707);SLC6A15(55117);CORO1C(23603); |
| | | ARPC3(10094);TMEM132D(121256);KIAA0323(23351);OTUB2 |
| | | (78990);FLJ45244(400242);KIAA0329(9895);JUB(84962); |
| | | C14orf139(79686);BCL11B(64919);KLF13(51621);SPRED1 |
| | | (161742);TM |

TABLE 4-62

| | | |
|---|---|---|
| | | OD2(29767);PTPLAD1(51495);PAQR5(54852);ABHD2(11057); |
| | | LRRK1(79705);ARPP-19(10776);SUHW4(54816);CHSY1(22856); |
| | | NFATC3(4775);TK2(7084);AP1G1(164);C16orf7(9605);RPA1 |
| | | (6117);LASP1(3927);BAIAP2(10458);CARKL(23729);VAMP2(6844); |
| | | FLJ44815(400591);LYK5(92335);C17orf62(79415);VAPA(9218); |
| | | CABLES1(91768);C18orf26(284254);TNFRSF11A(8792);DOK6 |
| | | (220164);ZNF24(7572);FVT1(2531);ARHGEF18(23370);TPM4 |
| | | (7171);7NF226(7769);ZNF547(284306);ZFP260(339324);ZNF571 |
| | | (51276);KLK13(26085);STK35(140901);DNAJC5(80331);PTPRT |
| | | (11122);SAMD10(140700);ICOSLG(23308);PDHA1(5160);RP11- |
| | | 311P8.3(139596);ARSD(414);WNK3(65267);RP11-130N24.1 |
| | | (340533);MCART6(401612);G6PD(2539);DAZ2(57055); |
| hsa-miR-9 | 75;691;692;693;694;695; | KLHDC7A(127707);NPAL3(57185);LDLRAP1(26119);WDTC1 |
| | 696;697;698;699;700;701; | (23038);TINAGL1(64129);CDC20(991);C1orf84(149469);MMACHC |
| | 702;3455;703;3456; | (25974);C1orf83(127428);IFI44(10561);LRRC8C(84230);HIPK1 |
| | 3457;704;705;706; | (204851);C1orf161(126868);FAM46C(54855);RAG1AP1(55974); |
| | | UHMK1(127933);ATP1B1(481);LAMC2(3918);NR5A2(2494); |
| | | GGPS1(9453);FUSIP1(10772);WASF2(10163);CC2D1B(200014); |
| | | FAM63A(55793);ADAR(103);PYGO2(90780);SHC1(6464);STX6 |
| | | (10228);ZBTB41(360023);TNNI1(7135);RIPK5(25778);ENAH |
| | | (55740);TMEM63A(9725);SLC30A6(55676);SOCS5(9655);MTHFD2 |
| | | (10797);FLJ12788(64427);HK2(3099);BCL2L11(10018);TMEM87B |
| | | (84910);STEAP3(55240);CCNT2(905);MGC52057(130574);ZAK |
| | | (51776);AOX1(316);FARP2(9855),TGOLN2(10618);EDAR(10913); |
| | | ORC4L(5000);KIAA1715(80856);FKBP7(51661);RAPH1(65059); |
| | | MKRN2(23609);SLC6A6(6533);PDCD6IP(10015);ZNF662 |
| | | (389114);SNRK(54861);LIMD1(8994);PTPRG(5793);ALCAM |
| | | (214);PHLDB2(90102);NUDT16(131870);CLDN18(51208);IL1RAP |
| | | (3556);ATP2B2(491);THRB(7068);PB1(55193);MAGI1(9223); |
| | | FOXP1(27086);EIF4E3(317649);GCET2(257144);FSTL1(11167); |
| | | TMCC1(23023);SMARCA3(6596);CPEB2(132864);ENPEP(2028); |
| | | TRIM2(23321);EIF4E(1977);KIAA1909(153478);MARCH6(10299); |
| | | FBXL7(23194);CTNNA1(1495);KIAA0141(9812);SLC26A2 |
| | | (1836);CPEB4(80315);UBXD8(23197);ANKH(56172);PRLR(5618); |
| | | ADAMTS6(11174);ENC1(8507);LHFPL2(10184);ARSB(411); |
| | | SLCO4C1(353189);MCC(4163);KLHL3(26249);GABRB2(2561); |
| | | PANK3(79646);SH3PXD2B(285590);FOXP4(116113);COL19A1 |
| | | (1310);LIN28B(389421);PRDM1(639);C6orf68(116150);TULP4 |
| | | (56995);MDGA1(266727);C6orf190(387357);CREB5(9586);PMS2L5 |
| | | (5383);ADAM22(53616);ZKSCAN1(7586);LOC136263(136263); |
| | | UBE3C(9690);LOC90639(90639);SLC35B4(84912);LOC401410 |
| | | (401410);TNKS(8658);ZNF705CP(389631);ZDHHC2(51201); |
| | | RBM13(84549);UNC5D(137970);SPFH2(11160);DDHD2(23259);PI15 |

TABLE 4-63

| | | |
|---|---|---|
| | | (51050);SLC30A8(169026);C8orf77(286103);PSD3(23362);STC1 |
| | | (6781);SLA(6503);MLANA(2315);ADAMTSL1(92949);NTRK2 |
| | | (4915);C9orf47(286223);SLC31A2(1318);C9orf91(203197);FAM73B |
| | | (84895);C9orf66(157983);TRIM14(9830);ROD1(9991);TNC(3371); |
| | | LOC399706(399706);ZNF37A(7587);SGPL1(8879);PCGF5(84333); |
| | | PI4KII(55361);ENTPD7(57089);SFXN2(118980);SEC23IP |
| | | (11196);GPR26(2849);ITGA8(8516);ST8SIA6(338596);IRXL1 |
| | | (283078);KCNMA1(3778);CPEB3(22849);GALNAC4S-6ST(51363); |
| | | SPRN(503542);SMAP(10944);TRIM44(54765);TBC1D10C(374403); |
| | | SLCO2B1(11309);SNF1LK2(23235);POU2F3(25833);XLKD1 |
| | | (10894);HPS5(11234);ABTB2(25841);ORAOV1(220064);BACE1 |
| | | (23621);PRDM10(56980);TMEM16F(196527);AQP2(359);ACCN2 |
| | | (41);TENC1(23371);HMGA2(8091);RIC8B(55188);SUDS3(64426); |
| | | EP400(57634);VAMP1(6843);CSDA(8531);DNAJC14(85406); |
| | | ZBTB39(9880);KITLG(4254);IKIP(121457);LOC440138(440138); |
| | | KLF5(688);ATP11A(23250);XPO4(64328);STARD13(90627); |
| | | SOCS4(122809);C14orf101(54916);SLC39A9(55334);COQ6 |
| | | (51004);IPO4(79711);MAMDC1(161357);NIN(51199);GCH1(2643); |
| | | SPTLC2(9517);GPR68(8111);BAHD1(22893);LOC440295(440295); |
| | | SLC28A1(9154);FBN1(2200);PRTG(283659);SUHW4(54816); |
| | | CALML4(91860);UACA(55075);FLJ39743(283777);PCSK6(5046); |
| | | KIAA1924(197335);C16orf34(90861);MKL2(57496);PRRT2 |
| | | (112476);SRCAP(10847);NFATC3(4775);WWP2(11060);KIAA0174 |
| | | (9798);FAM86A(196483);TXNDC11(51061);PRDM7(11105);MYOCD |
| | | (93649);PNPO(55163);TMEM49(81671);MAP3K3(4215);KCNJ2 |
| | | (3759);TTYH2(94015);ANKFY1(51479);SSH2(85464);CCL3L3 |
| | | (414062);TCF2(6928);SMARCE1(6605);HOXB13(10481);DLX3 |
| | | (1747);SPAG9(9043);TRIM25(7706);SMARCD2(6603);CD300LB |
| | | (124599);KIAA1328(57536);SLC14A1(6563);DOK6(220164); |
| | | SNK1G2(1455);MAP2K7(5609);KCNJ14(3770);ZNF471(57573); |
| | | ELAVL1(1994);BRD4(23476);PCSK2(5126);C20orf121(79183); |
| | | ARFGEF2(10564);C20orf117(140710);NFATC2(4773);C21orf62 |
| | | (56245);HIC2(23119);KIAA0376(23384);PPARA(5465);TBC1D22A |
| | | (25771);PPM1F(9647);ALG12(79087);APXL(357);CYBB(1536); |
| | | CXorf39(139231);DDX268(203522);ZNF185(7739);RPL10(6134); |
| | | CXorf36(79742);PHF8(23133);ODZ1(10178); |
| hsa-miR-23b | 76;3458;707;708;709;710; | PNRC2(55629);DNAJC6(9829);PDE4B(5142);LRRC8C(84230); |
| | 711;712;713;714;715;716;717; | IL6R(3570);ICMT(23463);DEPDC1(55635);TMED5(50999); |
| | 718;719;720;721;722;723;724; | LOC339745(339745);FLJ38973(205327);ERBB4(2066);TRIP12 |
| | 725;726;727;728;729;730;731; | (9320);STT3B(201595);MED12L(116931);LPP(4026);ZIC4 |
| | 732;733;734;735;736;737;738; | (84107);ZNF141(7700);WHSC1(7468);POU4F2(5458);CLCN3(1182); |
| | 1481;1482; | ZNF721(170960);ATP8A1(10396);GABRG1(2565);DCP2(167227); |
| | | PRLR(5618);FYB(2533);MOCS2(4338);C2(717);RDS(5961);TSPYL4( |

TABLE 4-64

| | | 23270);MPP6(51678);ZNRF2(223082);ZNF588(51427);ZNF138 |
|---|---|---|
| | | (7697);LOC441257(441257)ZNF655(79027);LSM8(51691); |
| | | KIAA0644(9865);ZNF680(340252);H-plk(51351);CNOT4(4850); |
| | | PDE7A(5150);PMP2(5375);NFX1(4799);C90rf47(286223);CUGBP2 |
| | | (10659);MRC1L1(414308);GHITM(27069);CXCL12(6387);C10orf46 |
| | | (143384);ADAM12(8038);STX3A(6809);FLJ20294(55626);CUGBP1 |
| | | (10658);ZF(58487);JOSD3(79101);SESN3(143686);KIAA1467 |
| | | (57613)ETNK1(55500);APAF1(317);GAS2L3(283431);SETD8 |
| | | (387893);SLC38A2(54407);CBX5(23468);PTPRB(5787);AKAP11 |
| | | (11215);HS6ST3(266722);PPP2R5E(5529);SEMA6D(80031);IL16 |
| | | (3603);LOC440295(440295);ZNF267(10306);NUFIP2(57532); |
| | | HELZ(9931);VAPA(9218);DOK6(220164);SOCS6(9306);SYT4 |
| | | (6860)ZNF253(56242);ZNF493(284443);ZNF257(113835);ZNF226 |
| | | (7769);7NF701(55762);ZNF676(163223);ZNF91(7644);LOC163131 |
| | | (163131);CARD8(22900);ZNF28(7576)ZNF468(90333);MGC35402 |
| | | (399669);ZNF702(79986);ZHX3(23051);B4GALT5(9334);BRWD1 |
| | | (54014);APOL6(80830);NUP50(10762);BIRC4(331);DDX26B |
| | | (203522);LOC401620(401620); |
| hsa-miR-27b | 77;3459;739;740;741; | C1orf144(26099);ST6GALNAC3(256435);VANGL1(81839); |
| | 742;743;744;745;746; | S100A7L1(338324);SHE(126669);LPGAT1(9926);CCNT2(905); |
| | 747;748;749;750;751; | SLC6A1(6529);SEC22L2(26984);ARMC8(25852);MUC4(4585);GAB1 |
| | 752;753;754;755;766; | (12549);ARSJ(79642);SLC7A11(23657);PLK2(10769);QKI(9444); |
| | 757;758;759;760;761; | EGFR(1956);PMS2L2(5380);NTRK2(4915);GPAM(57678); |
| | 762;763;764;765;766; | TNFRSF19L(84957);PANX1(24145);LETMD1(25875);ZIC5(85416); |
| | 767;768;769;770;771; | CSNK1G1(53944);GSPT1(2936);PHLPPL(23035);MAP2K4(6416); |
| | 772;773;1483; | KSR1(8844);UNQ5783(388325);FLJ34922(91607);TMEM101 |
| | | (84336);HDHD2(84064);FOXA3(3171);HEMK2(29104);MAPK1 |
| | | (5594);PRKX(5613);ARHGEF6(9459);PRKY(5616);ABCA1(19); |
| | | ACACA(31);ACOX1(51);ADCY2(108);ALCAM(214);APOE(348); |
| | | ARF3(377);ASPH(444);BMPR2(659);CAPN3(825);CD28(940); |
| | | CDR2(1039);CDS1(1040);CLCN3(1182);MAPK14(1432);CSF1 |
| | | (1435);DCX(1641);DTNA(1837);EDNRA(1909);EIF5(1983);ELAVL1 |
| | | (1994);EPS15(2060);EYA4(2070);FKBP4(2288);FOXO1A(2308); |
| | | GLRA2(2742);GNS(2799);GPD2(2820);GRSF1(2926);GTF2H2 |
| | | (2966);HD(3064);HOXA5(3202);IGSF3(3321);HTLF(3344);IDS |
| | | (3423);IRF4(3662);KCNK2(3776);KPNA3(3839);TNPO1(3842); |
| | | LGALS8(3964);LIFR(3977);SMAD2(4087);SMAD5(4090);SMAD9 |
| | | (4093);KITLG(4254);MLL(4297);MYT1(4661);NFATC2(4773);NGFR |
| | | (4804);NKTR(4820);NOVA1(4857);OPHN1(4983);PDPK1(5170); |
| | | PRLR(5618);PSEN1(5663);PTCH(5727);RAP2A(5911);RARA(5914); |
| | | RP86KB1(6198);SNAP25(6616);SORL1(6653); |
| hsa-miR-28 | 78;774;775;776;777; | QSCN6(5768);NAV1(89796);C1orf95(375057);MTHFR(4524); |
| | 778;779;780;781;782; | KIAA0319L(79932);GON4L(54856);INPP4A(3631);RHBDD1(8423 |
| | 783;784;785;1484;14 | |

TABLE 4-65

| | | |
|---|---|---|
| | 85;1486;1487; | 6);TMEM127(55654);THRB(7068);IL17RD(54756);G3BP(10146); |
| | | N4BP3(23138);ADAMTS2(9509);ZNF192(7745);AGPAT4(56895); |
| | | MGC11257(84310);LOC401357(401357);KIAA0773(9715); |
| | | LRRC14(9684);ZNF406(57623);NTRK2(4915);PAPPA(5069);NDOR1 |
| | | (27158);BAG1(573);GPR26(2849);HPS1(3257);ZNFN1A4(64375); |
| | | ZNF641(121274);FMNL3(91010);CIT(11113);ATP11A(23250); |
| | | SNX22(79856);THOC6(79228);HSPC065(29070);KIAA1576(57687); |
| | | LOC348180(348180);FAM100A(124402);PNPO(55163);METT10D |
| | | (79066);SCRN2(90507);RECQL5(9400);C18orf24(220134); |
| | | DMRTC2(63946);BCAM(4059);FLJ45445(399844);PLAC2(257000); |
| | | AGPAT3(56894);FLJ21125(79680);LOC150383(150383);SHOX |
| | | (6473);IQSEC2(23096); |
| hsa-miR-31 | 79;786;787;788;789; | KIF1B(23095);CTTNBP2NL(55917);RGS4(5999);PRRX1(5896); |
| | 790;791;3460;792; | PRELP(5549);C1orf150(148823);CCNL2(81669);SYNC1(81493); |
| | | HPCAL4(51440);TMEM53(79639);RSBN1(54665);GLUL(2752); |
| | | PLEKHA6(22874);RPE(6120);RHBDD1(84236);FLJ34931(388939); |
| | | RND3(390);PGAP1(80055);RAP2B(5912);ZNF445(353274); |
| | | VGLL3(389136);DCBLD2(131566);UTS2D(257313);C1QTNF7 |
| | | (114905);AFF1(4299);KIAA1909(153478);FLJ36748(134265); |
| | | SGCD(6444);SYNJ2(8871);MOCS1(4337);TRAM2(9697);PDE10A |
| | | (10846);ZNRF2(223082);KIAA0265(23008);JAZF1(221895);SFRP4 |
| | | (6424);WISP1(8840);PDE7A(5150);PAG1(55824);LOC158381 |
| | | (158381);C9orf47(286223);AKNA(80709);PCDH21(92211);TNKS2 |
| | | (80351);ENTPD7(57089);DIP2C(22982);C10orf67(256815); |
| | | CXCL12(6387);ATAD1(84896);IDE(3416);SMBP(56889);RBM14 |
| | | (10432);TMEM45B(120224);PDGFD(80310);PPP2R1B(5519);GPRC5A |
| | | (9052);EMP1(2012);ETNK1(55500);FKBP11(51303);SPATA13 |
| | | (221178);NDFIP2(54602);HSPH1(10808);SIX4(51804);ENTPD5 |
| | | (957);FEM1B(10116);ZA20D3(54469);UBE3A(7337);MYO5A(4644); |
| | | VPS13C(54832);KIAA1924(197335);MEFV(4210);ABCC6(368); |
| | | ZNF689(115509);C17orf45(125144);M-RIP(23164);DHX8(1659); |
| | | NSF(4905);NLE1(54475);LOC641522(641522);FTSJ8(117246); |
| | | HRH4(59340);SOCS6(9306);C18orf4(92126);DFY19L3(147991); |
| | | MLL4(9757);SIGLEC8(27181);TM9SF4(9777);NSFL1C(55968); |
| | | C20orf128(128876);BRWD1(54014);DGCR14(8220);ST13(6767); |
| | | CHKB(1120);ARMCX4(158947);SPRY3(10251);CXorf20(139105); |
| | | RNF12(51132); |
| hsa-miR-33b | 80;3461;793;794;795; | KIF1B(23095);TTC4(7268);SYT11(23208);BLZF1(8548);DISC1 |
| | 796;797;798;799;800; | (27185);C1orf150(148823);AGMAT(79814);SLC16A1(6566); |
| | 801;802;803;804;1488; | B3GALT2(8707);C1orf80(64853);PPM1B(5495);STON1(11037); |
| | | MAP4K4(9448);FLJ40432(151195);KIF3C(3797);KIAA1641(57730); |
| | | AFF3(3899);SATB2(23314);MKRN2(23609);EPHA3(2042);CD96 |
| | | (10225);KCNAB1(7881);ATP11B(23200);PRICKLE2(166336);Z |

TABLE 4-66

| | | |
|---|---|---|
| | | NF148(7707);EIF5A2(56648);WIG1(64393)MASP1(5648);SH3BP2 |
| | | (6452);PDGFRA(5156);FGF5(2250);PPP2R2C(5522);ASAHL |
| | | (27163);SLC7A11(23657);SETD7(80854);CSPG2(1462);CAMK4 |
| | | (814);PRLR(5618);FSTL4(23105);PGM3(5238);GOPC(57120); |
| | | HBS1L(10767);HECW1(23072);CROT(54677);BCAP29(55973); |
| | | EXOC4(60412);TMED4(222068);STEAP4(79689);CDK6(1021); |
| | | SLC39A14(23516);INDOL1(169355);ENTPD4(9583);MMP16(4325); |
| | | DDEF1(50807);PALM2-AKAP2(445815);ABCA1(19);RP11-162I21.1 |
| | | (340843);ARL5B(221079);IFIT1(3434);CAMK2G(818);KCNMA1 |
| | | (3778);FUT4(2526);CACNA1C(775);SCN8A(6334);HMGA2 |
| | | (8091);KRTHB5(3891);EEA1(8411);F7(2155);PSPC1(55269); |
| | | KCTD12(115207);PAPLN(89932);C14orf132(56967);WDR20 |
| | | (91833);SIX4(51804);PNMA1(9240);MEIS2(4212);CALML4(91860); |
| | | NFAT5(10725);BOLA2(552900);MYOCD(93649);APPBP2(10513); |
| | | L3MBTL4(91133);TCEB3C(162699);SH3GL1(6455);ZNF432 |
| | | (9668);TXNDC13(56255);CD93(22918);FAM112A(149699);SIM2 |
| | | (6493);DSCR1(1827);YWHAH(7533);PPARA(5465);MAOA(4128); |
| | | OGT(8473);CHM(1121); |
| hsa-miR-96 | 81;805;806;807;808; | SPSB1(80176);LPPR4(9890);SYPL2(284612);C1orf56(54964); |
| | 809;810;811;812;813; | PRRX1(5396);LUZP1(7798);CLSPN(63967);PRKAB2(5565);RGS5 |
| | 814;815;816;817;1489; | (8490)ZBTB41(360023);IRF6(3664);RGPD2(440872);TBR1 |
| | 1490;1491; | (10716);CTDSP1(58190);ATG16L1(55054);FLJ23861(151050);ATG9A |
| | | (79065);LIMD1(8994);APPL(26060);CACNA2D2(9254);KIAA2018 |
| | | (205717);DGKG(1608);MTRR(4552);SAR1B(51128);SLC36A2 |
| | | (153201);SH3PXD2B(285590);TRIM7(81786);BRPF3(27154); |
| | | PAQR8(85315);C6orf72(116254);ATXN1(6310);AGPAT4(56895); |
| | | IQCE(23288);TTYH3(80727);TRIM56(81844);HBP1(26959); |
| | | KIAA0895(23366);CDK6(1021);DLGAP2(9228);RBPMS(11030); |
| | | GRHL2(79977);PHF20L1(51105);FAM49B(51571);SLC1A1(6505); |
| | | SPIN(10927);C9orf47(286223);AK3(50808);TPM2(7169);GRIN3A |
| | | (116443);EPB41L4B(54566);HSPA14(51182);PCGF5(84333); |
| | | NANOS1(340719);C10orf67(256815);C10orf72(196740);OVOL1 |
| | | (5017);ARHGEF12(23365);BET1L(51272);CD59(966);SLC1A2 |
| | | (6506);NEUROD4(58158);SOX5(6660);KRAS(3845);ADCY6(112); |
| | | FMNL3(91010);DDIT3(1649);B4GALNT1(2583);RFP2(10206); |
| | | FOXO1A(2308);OXGR1(27199);APEX1(328);SLC24A4(123041); |
| | | KIAA0284(283638);NOVA1(4857);TRIM9(114088);RDH11(51109); |
| | | RAB8B(51762);GOLGA(55889);IL16(3603);LOC440295(440295); |
| | | PRTG(283659);GNAO1(2775);KIAA0513(9764);ZNF694(342357); |
| | | NLGN2(57555);MYOCD(93649);AKAP1(8165);ACE(1636); |
| | | UBE2G1(7326);CACNB1(782);TBC1D16(125058);LIPG(9388); |
| | | SIN3B(23309);ZNF175(7728);LOC91661(91661);ZNF585A(199704); |
| | | TRIB3(57761);RIMS4(140730);CYYR1(116159);HEMK2(291 |

TABLE 4-67

| | | 04); BRWD1(54014); MAPK1(5694); DERL3(91319); DUSP18(150290); |
|---|---|---|
| | | LOC440836(440836); MSN(4478); ABCD1(215); SPRY3(10251); |
| | | ARHGAP6(395); RP11-130N24.1(340533); LRCH2(57631); |
| hsa-miR- | 82; 818; 819; | DFFB(1677); TARDBP(23435); CLCN6(1185); C1orf130(400746); |
| 100 | 820; 821; 822; | C1orf190(541468); PCSK9(255738); RAVER2(55225); LRRC8B(23507); |
| | 823; 824; 825; | LPPR4(9890); CKS1B(1163); PEA15(8682); SDHC(6391); KIAA0495 |
| | 826; 827; 828; | (57212); ICMT(23463); FRAP1(2475); E2F2(1870); MYCBP(26292); |
| | 829; 830; 831; | FOXJ3(22887); GNG5(2787); GATAD2B(57459); F11R(50848); |
| | 832; 833; 1492; | TRIB2(28951); RASGRP3(25780); TMEM87B(84910); ALS2CR19 |
| | 1493; 1494; 1495; | (117583); FAM49A(81553); UCN(7349); SMEK2(57223); CYP26B1 |
| | 1496; 1497; 1498; | (56603); FLJ13946(92104); GPR55(9290); CTDSPL(10217); |
| | 1499; 1500; 1501; | ZNF197(10168); KBTBD8(84541); MBNL1(4154); GMPS(8833); |
| | 1502; 1503; 1504; | CLDN11(5010); ANKRD28(23243); SATB1(6304); CDC25A(993); |
| | 1505; 1506; 1507; | MASP1(5648); ZNF595(152687); MYL5(4636); FGFR3(2261); C4orf16 |
| | 1508; 1509; 1510; | (55435); SMARCA5(8467); ETFDH(2110); GABRA2(2555); HSD17B13 |
| | 1511; 1512; 1513; | (345275); PPP3CA(5530); POLS(11044); FLJ11193(55322); |
| | | TNFAIP8(25816); SLC12A2(6558); SH3RF2(153769); ERGIC1(57222); |
| | | MCC(4163); IBRDC2(255488); SKIV2L(6499); FOXO3A(2309); |
| | | HLA-DOA(3111); FKBP5(2289); CFNE5(57699); VNN1(8876); C7orf20 |
| | | (51608); EPDR1(54749); ADCY1(107); HOXA1(3198); HIP1(3092); |
| | | IMPDH1(3614); PODXL(5420); PTPRN2(5799); ZNF406(57623); |
| | | EIF2C2(27161); MLANA(2315); ACO1(48); SLC44A1(23446); |
| | | ZNF483(158399); UGCG(7357); RASSF4(83937); TSPAN14(81619); |
| | | PNLIPRP3(119548); NEBL(10529); FZD8(8325); KIAA1754(85450); |
| | | PDZD8(118987); INPPL1(3636); SORL1(6653); ST5(6764); HRASLS3 |
| | | (11145); TMPRSS13(84000); GDF11(10220); RAP1B(5908); |
| | | THAP2(83591); SUDS3(64426); FLJ46363(400002); WBP11(51729); |
| | | BAZ2A(11176); GNS(2799); NT5DC3(51559); GOLGA3(2802); |
| | | LOC283514(283514); RCBTB1(55213); RASA3(22821); C14orf92 |
| | | (9878); KIAA0284(283638); ITPK1(3705); ZFYVE19(84936); ARID3B |
| | | (10620); IREB2(3658); HS3ST2(9956); SCNN1G(6340); SPN |
| | | (6693); NUTF2(10204); RRN3(54700); GPRC5B(51704); ZNF19(7567); |
| | | KIAA0672(9912); HS3ST3B1(9953); raptor(57521); BAIAP2(10458); |
| | | ZZEF1(23140); CXCL16(58191); LOC201181(201181); STAT5B |
| | | (6777); TBC1D16(125058); MAPRE2(10982); STATIP1(55250); |
| | | SLC14A1(6563); LOC400657(400657); ZADH2(284273); ARID3A |
| | | (1820); CIRBP(1153); TNFAIP8L1(126282); NRTN(4902); DPY19L3 |
| | | (147991); ZNF568(374900); ZNF226(7769); SAE1(10055); KCNJ14 |
| | | (3770); MBD3(53615); EMR2(30817); SLC8A2(6543); INSM1 |
| | | (3642); CD93(22918); LAMA5(3911); GM632(57473); MTMR3(8897); |
| | | LIF(3976); WWC3(55841); OGT(8473); GLT28D1(55849); ZCCHC12 |
| | | (170261); ATP11C(286410); |
| hsa-miR- | 83; 834; 3462; | FNBP1L,(54874); IPO9(55705); FLVCR(28982); DFFA(1676); E2F2 |
| 106a | 835; 836; 887; | |
| | 838; 8 | |

TABLE 4-68

| | | |
|---|---|---|
| | 39; 840; 841; | (1870); ENSA(2029); CTSS(1520); ISG20L2(81875); C1orf24(116496); |
| | 842; 843; 844; | YOD1(55432); PGBD5(79605); UBXD4(165324); DPYSL5(56896); |
| | 845; 846; 847; | MGC5509(79074); CYBRD1(79901); ZAK(51776); BMPR2(659); |
| | 848; 849; 850; | CREB1(1385); MYT1L(23040); FLJ14397(84865); RNF149(284996); |
| | 851; 852; 853; | GPR155(151556); NR2C2(7182); SEC22L3(9117) ; FYCO1 (79443); |
| | 854; 855; 856; | TMEM113(80335); MGC40579(256356); EIF5A2(56648); WHSC1 |
| | 857; | (7468); PKD2(5311); PDLIM5(10611); LRPAP1(4043); USP46 |
| | | (64854); EPHA5(2044); ASAHL(27163); MGC33302(256471); SLC7A11 |
| | | (23657); LOC152485(152485); KIAA1909(153478); SERF1A(8293); |
| | | ARHGAP26(23092); G3BP(10146); LSM11(134353); SEMA5A |
| | | (9037); FLJ25680(134187); IRF1(3659); PANK3(79646); KIAA1191 |
| | | (57179); KIAA1919(91749); NUDT3(11165); DKFZP686A10121 |
| | | (85865); GATAD1(57798); ZKSCAN1(7586); NOM1(64434); TMED4 |
| | | (222068); HIP1(3092); RABL5(64792); NAPE-PLD(222236); FLJ13576 |
| | | (64418); PIWIL2(55124); SGK3(23678); PPP1R3B(79660); RAB11FIP1 |
| | | (80223); FGFR1(2260); PAG1(55824); PDCD1LG2(80380); C9orf47 |
| | | (286223); FAM102A(399665); DHTKD1(55526); POLR3A(11128); |
| | | PRRG4(79056); KIAA1377(57562); C11orf1(64776); PGM2L1(283209); |
| | | FGD4(121512); ERBB3(2065); GTF2H3(2967); LOC283537(283537); |
| | | KATNAL1(84056); KLF12(11278); RNF31(55072); CHURC1(91612); |
| | | C14orf153(84334); SPTLC2(9517); BCL11B(64919); ABHD2(11057); |
| | | NFATC2IP(84901); SPN(6693); MARVELD3(91862); FTS(64400); |
| | | DYNC1LI2 (1783); PNPO(55163); IGF2BP1(10642); PRR11(55771); |
| | | SSTR2(6752); ZBTB4(57659); STAT3(6774); GJA7(10052); |
| | | TNFAIP8L1(126282); LDLR(3949); F2RL3(9002); SPIB(6689); |
| | | ZNF264(9422); SFRS14(10147); OPA3(80207); ZFPL(162967); |
| | | POFUT1(23509); C20orf121(79183); RAB22A(57403); C20orf117 |
| | | (140710); PTPRT(11122); ZNFX1(57169); GM632(57473); ADARB1 |
| | | (104); BRWD1(54014); TNRC6B(23112); LOC63929(63929); PPARA(5465); |
| | | PCYT1B(9468); RNF12(51132); |
| hsa-miR- | 84; 3463; 858; | NFIA(4774); TMEM56(148534); TTF2(8458); MTB41(360023); DDX59 |
| 126* | 3464; 859; 860; | (83479); ESRRG(2104); FLJ30294(130827); CCNT2(905); INPP5D(3635); |
| | 861; 862; | MAP3K2(10746); NDUFS1(4719); COMMD2(51122); RUFY3(22902); |
| | | DAPP1(27071); GABRA4 (2557) MAPK10(5602); ARSK(153642); |
| | | CAMK2A(815); GABRB2(2561); SH3BGRL2(83699); PHACTR2(9749); |
| | | CDC2L6(23097); EGFR(1956); LOC441257(441257); HOXA13(3209); |
| | | CNOT4(4850); C8orf49(606553); KIAA1456(57604); EFHA2(286097); |
| | | NAT1(9); UNC5D(137970); PI15(51050); CA13(377677); PLAG1(5324); |
| | | REXO1L1(254958); TRPS1(7227); KGFLP1(387628); VPS13A(23230); |
| | | C9orf47(286223); TGFBR1(7046); KGFLP2(654466); TRIM8(81603); |
| | | ZNF11B(7558); LOC399947(399947); FBXO3(26273); RAB30(27314); |
| | | PDGFD(80310); A2ML1(144568); CLEC12B(387837); CNTN1(1272); |
| | | HOXC12(3228); |

TABLE 4-69

| | | |
|---|---|---|
| | | HOXC8(3224); DYRK2(8445); CHST11(50515); RFX4(5992); HSPB8 |
| | | (26353); ZNF10(7556); SOX5(6660); SYT10(341359); SLC6A15 |
| | | (55117); GALNT4(8693); ARL11(115761); TBC1D4(9882); L2HGDH |
| | | (79944); 76P(27229); FGF7(2252); NLF1(145741); MYEF2(50804); |
| | | TNFAIP8L3(388121); GGT6(124975); GJA7(10052); LOC284434 |
| | | (284434); SF4(57794); PLCB1(23236); POFUT1(23509); KCNB1 |
| | | (3745); YIPF6(286451); EDA2R(60401); MCART6(401612); |
| hsa-miR- | 85; 863; 864; | PRKCZ(5590); PRDM16(63976); DFFB(1677); TNFRSF8(943); LDLRAP1 |
| 127 | 865; 866; 867; | (26119); LOC388610(388610); RPRC1 (56700); C1orf113(79729); |
| | 868; 869; 870; | PKN2(5586); ZNF326(284695); EDG1 (1901); CYB561D1(284613); |
| | 871; 872; 873; | BOLA1(51027); ATP1A2(477); HLX1(3142); FBXO28(23219); |
| | | WNT3A(89780); C1orf159(54991); C1orf86(199990); MTHFR(4524); |
| | | CSF3R(1441); NHLH2(4808); PAQR6(79957); KIAA0040(9674); |
| | | SLC26A9(115019); LGTN(1939); SOX11(6664); ALF(11036); LOC56902 |
| | | (56902); JMJD1A(55818); EPB41L5(57669); SFT2D3(84826); LASS6 |
| | | (253782); ITGA6(3655); ACSL3(2181); ING5(84289); SDC1(6382); |
| | | PREB(10113); PAX8(7849); GPR1(2825); C2orf19(394261); |
| | | RNF123(63891); MAPKAPK3(7867); BOC(91653); YEATS2(55689); |
| | | CHRD(8646); QRICH1(54870); IHPK1(9807); MAGI1(9223); LETM1 |
| | | (3954); TIFA(92610); PMCHL1(5369); SKP2(6502); PMCHL2 |
| | | (5370); PTCD2(79810); C5orf16(285613); HTR1A(3350); ATG12 |
| | | (9140); PITX1(5307); CDC23(8697); SLC26A2(83884); RIPK1(8737); |
| | | PPP1R11(6992); HLA-DOA(3111); EPM2A(7957); MAFK(7975); |
| | | FOXK1(221937); SEPT7(989); YKT6(10652); CYLN2(7461); DLX6 |
| | | (1750); ARPC1A(10552); GNA12(2768); WBSCR18(84277); NCF1 |
| | | (4687); STEAP4(79689); DKFZP434B0335(25851); FLJ39237(375607); |
| | | TRIM85(23087); MSC(9242); C9orf19(152007); GADD45G(10912); |
| | | SLC27A4(10999); PPP2R4(5524); GPR107(57720); PTGDS(5730); |
| | | SMU1(55234); AQP3(360); IKBKAP(8518); SURF6(6838); INPP5E |
| | | (56623); GTPBP4(23560); RASSF4(83937); PCDH21(92211); ENTPD7 |
| | | (57089); BCCIP(56647); LRRC27(80313); IL2RA(3559); DLG5(9231); |
| | | POLR3A(11128); FAM26C(255022); MYOD1(4654); FJX1(24147); |
| | | CREB3L1(90993); HTATIP(10524); ADRBK1(156); RAD9A(5883); |
| | | SNF1LK2(23235); NRGN(4900); HNT(50863); NUP98(4928); SYT7 |
| | | (9066); CHRM1(1128); BAD(572); NUMA1(4926); SCN4B(6330); |
| | | DDX11(1663); TMEM16F(196527); SCN8A(6334); TARBP2(6895); |
| | | SLC26A10(65012); RASSF3(283349); UBE3B(89910); P2RX7(5027); |
| | | SETD8(387893); FMNL3(91010); GOLGA3(2802); RAP2A(5911); |
| | | TPTE2(93492); C14orf140(79696); CCNK(8812); FLJ41170(440200); |
| | | KIAA2010(55871); ANKRD9(122416); BAG5(9529); XRCC3(7517); |
| | | TMCO5(145942); Gcom1(145781); PML(5371); ISLR2(57611); AKAP13 |
| | | (11214); MEIS2(4212); SLTM(79811); CA12(771); CLN6(54982); |
| | | DKFZp434I1020(196968); MGC15416(8 |

TABLE 4-70

| | | 4331); SOX8(30812); PMM2(5373); BFAR(51283); ATP2A1(487); |
|---|---|---|
| | | TMEM8(58986); C16orf28(65259); C16orf5(29965); RABEP2(79874); |
| | | SMPD3(55512); FLJ12998(64779); TIMM22(29928); RUTBC1(9905); |
| | | KIAA0523(23302); TNFSF12(8742); MAP2K4(6416); RAI1 (10743); |
| | | LHX1(3975); ITGA3(3675); BCAS3(54828); KCTD2(23510); ARMC7 |
| | | (79637); TNRC6C(57690); TMC8(147138); MRPL12(6182); METRNL |
| | | (284207); SCARF1(8578); VAMP2(6844); CYGB(114757); ZNF271 |
| | | (10778); MAPK4(5596); KLHL14(57565); RAX(30062); PQLC1 |
| | | (80148); PARD6G(84552); C19orf20(91978); HMG20B(10362); |
| | | ILF3(3609); PGPEP1(54858); GATAD2A(54815); FXYD7(53822); |
| | | EGFL4(1954); LOC400707(400707); LOC147650(147650); KIAA1193 |
| | | (54531); FLJ45684(400666); GNG7(2788); DIRAS1(148252); |
| | | ZBTB7A(51341); ANGPTL6(83854); ICAM3(3385); PLAUR(5329); |
| | | MEIS3(56917); KLK12(43849); LOC284296(284296); ZNF499(84878); |
| | | STK35(140901); KIF3B(9371); C20orf23(55614); VSX1(30813); |
| | | SLA2(84174); RIMS4(140730); KCNS1(3787); TTC3(7267); ZNF294 |
| | | (26046); C21orf93(246704); RAB36(9609); RASD2(23551); MGAT3 |
| | | (4248); ACO2(50); FLJ27365(400931); DIP(23151); CLDN5 |
| | | (7122); LOC388886(388886); SYN3(8224); LOC440836(440836); |
| | | CHST7(56548); FLJ21687(79917); AVPR2(554); SMC1L1(8243); |
| | | MTCP1(4515); |
| hsa-miR- | 86; 3465; 874; | KIF1B(23095); C1orf144(26099); FAM102B(284611); CYB561D1 |
| 128b | 875; 876; 877; | (284613); VANGL1(81839); RASAL2(9462); C1orf69(200205); DISC1 |
| | 878; 879; 880; | (27185); TRIM58(25893); IL28RA(163702); AK2(204); KCNJ10(3766); |
| | 881; 882; 883; | LPGAT1(9926); USH2A(7399); CASP8(841); PGAP1(80055); |
| | 884; 885; 886; | WDFY1(57590); ITGA9(3680); ZNF621(285268); DTX3L(151636); |
| | 887; 888; 889; | ARMC8(25852); ZNF445(353274); CDCP1(64866); TBC1D1(23216); |
| | 890; 1514; | MOBKL1A(92597); LETM1(3954); FLJ38991(285521); FAM105B(90268); |
| | | NDST1(3340); SGCD(6444); SLC22A7(10864); ICK(22858); |
| | | TSPAN13(27075); CPA4(51200); PMS2(5395); CALN1(83698); |
| | | PMS2L2(5380); KBTBD11(9920); SLC7A2(6542); TACC1(6867); |
| | | C8orf42(157695); C9orf47(286223); C9orf28(89853); VAV2(7410); |
| | | MARCH8(220972); SAR1A(56681); SORL1(6653); TOLLIP(54472); |
| | | PPP2R1B(5519); FLJ25477(219287); SLC7A1(6541); XRCC3(7517); |
| | | EIF3S1(8669); CD276(80381); IL16(3603); GRAMD2(196996); |
| | | FLJ22795(80154); PDPK1(5170); EXOSC6(118460); STXBP4(252983); |
| | | UNQ5783(388325); FLJ31952(146857); LOC162427(162427); |
| | | TMEM101(84336); C17orf62(79415); C18orf25(147339); SS18(6760); |
| | | MUM1(84939); LOC390980(390980); ZNF329(79673); PLAGL2 |
| | | (5326); FLJ30313(253868); DGCR2(9993); HTF9C(27037); PHF6 |
| | | (84295); DCX(1641); PRKY(5616); |
| hsa-miR- | 87; 3466; 891; | LIN28(79727); MAN1A2(10905); CAMK2N1(55450); KIAA0040(9674); |
| 129 | 3467; 892; 893; | CDC42EP3(10602); NRXN1(9378); REEP1(65055); CACNB4 |
| | 894; 895; 896; | |
| | 897; 1515; | |

TABLE 4-71

| | | |
|---|---|---|
| | | (785); NR2C2(7182); RBMS3(27303); MOBP(4336); WNT5A(7474); |
| | | FGF12(2257); MFAP3L(9848); RNUXA(51808); G3BP(10146); SGCD |
| | | (6444); ANKH(56172); SOX4(6659); C6orf68(116150); SYNCRIP |
| | | (10492); SIM1(6492); TFB1M(51106); RBAK(57786); ZNRF2(223082); |
| | | STEAP2(261729); ETV1(2115); CDK6(1021); LMBR1(64327); |
| | | MATN2(4147); PSD3(23362); NTRK2(4915); MAK10(60560); GNAQ |
| | | (2776); SETX(23064); LDB3(11155); ADRB1(153); NEBL(10529); |
| | | CPEB3(22849); RAB30(27314); JOSD3(79101); EMP1(2012); CPM |
| | | (1368); IGF1(3479); SBNO1(55206); TNFSF11(8600); PCDH17 |
| | | (27253) MEF2A(4205); PAPD5(64282); GRIN2A(2903); THUMPD1 |
| | | (55623); BIRC4BP(54739); RPS6KB1(6198); BRCA1(672); LOC284434 |
| | | (284434); HEMK2(29104); RUNX1(861); BRWD1(54014); TNRC6B |
| | | (23112); PPARA(5465); ZBTB33(10009); BIRC4(331); EDA2R |
| | | (60401); RP13-383K5.1(55285); AMMECR1(9949); |
| hsa-miR- | 88; 898; 899; | KIAA1026(23254); MTB40(9923); KPNA6(23633); PTHP2(58155); |
| 133a | 900; 901; 902; | ZBTB7B(51048); ATP2B4(493); CDC2L2(985); NADK(65220); MELL1 |
| hsa-miR- | 903; 904; 905; | (79258); HSPB7(27129); ZNF436(80818); WASF2(10163); KIAA0319L |
| 133b | 906; 911; 907; | (79932); HPCAL4(51440); PIK3R3(8503); MOBKL2C(148932); |
| | 908; 909; 912; | C1orf110(339512); SYT2(127833); SUSD4(55061); FLJ45717 |
| | 3468; 910; 89; | (388759); FOSL2(2355); DOK1(1796); G6PC2(57818); ALPI(248); |
| | | ASB1(51685); SFXN5(94097); ZNF142(7701); PER2(8864); KIF1A |
| | | (547); XYLB(9942); CHCHD6(84303); RAP2B(5912); MAP4(4134); |
| | | SCOTIN(51246); IHPK1(9807); LEPREL1(55214); LETMI(3954); |
| | | DKFZp761B107(91050); PCDHGA1(56114); G3BP(10146); MAML1 |
| | | (9794); RNF44(22838); ADAMTS2(9509); C6orf134(79969); PACSIN1 |
| | | (29993); C6orf69(222658); GLP1R(2740); TTBK1(84630); C6orf71 |
| | | (389434); C6orf149(57128); STX7(8417); TTYH3(80727); FOXK1 |
| | | (221937); WIPI2(26100); ADCY1(107); CYLN2(7461); TRIAD3 |
| | | (54476); WBSCR16(81554); DLGAP2(9228); TNFRSF10B(8795); |
| | | RAB11FIP1(80223); LOC441426(441426); GCNT1(2650); PALM2 |
| | | (114299); PHF19(26147); ST6GALNAC6(30815); ABO(28); KIAA1274 |
| | | (27143); SFTPA1(6435); SFMBT2(57713); SFTPA2(6436); KCNIP2 |
| | | (30819); DKFZp686O24166(374383); RAG1(5896); KIAA0652 |
| | | (9776); FLJ13848(79829); CDC42EP2(10435); IGHM13P2(3508); |
| | | TPCN2(219931); CBL(867); SLC15A3(51296); LRRC32(2615); GRM5 |
| | | (2915); SCN2B(6327); CD4(920); LRRC23(10233); KIAA1853 |
| | | (84530); GLS2(27165); BAZ2A(11176); CORO1C(23603); PITPNM2 |
| | | (57605); BCL2L2(599); C14orf115(55237); DLST(1743); SLC7A8 |
| | | (23428); SPTB (6710); GPR68(8111); GLDN(342035); SH3PX3 |
| | | (257364); NIPA1(128606); BMF(90427); FRMD5(84978); FLJ38723 |
| | | (255180); FLJ22795(80154); DKFZp43411020(196968); SOLH(6650); |
| | | RAB40C(57799); FLJ39599(255027); CASKIN1(57524); GP2(2813); |
| | | SMPD3(55512); TUSC5(286753); LASP1(3927); 1TGA3(3675); MG |

TABLE 4-72

| | | |
|---|---|---|
| | | AT5B(146664); BAIAP2(10458); METT10D(79066); CAMTA2(23125); |
| | | HCP1(113235); GIT1(28964); AP1GBP1(11276); PERLD1(93210); |
| | | LIMD2(80774); CD300LB(124599); TMC6(11322); TBC1D16 |
| | | (125058); SGSH(6448); COLEC12(81035); MBD2(8932); P2RY11 |
| | | (5032); DNM2(1785); SYDE1(85360); TPM4(7171); ZFP36(7538); |
| | | EGFL4(1954); EHD2(30846); TCF3(6929); COL5A3(50509); ZNF43 |
| | | (7594); FBXO27(126433); PPP1R12C(54776); FLJ14768(84922); |
| | | SOX12(6666); MMP24(10893); NNAT(4826); NTSR1(4923); ADRA1D |
| | | (146); GGTLS(2686); C20orf117(140710); RIMS4(140730); IFNAR1 |
| | | (3454); ADARB1(104); C21orf24(400866); TMPRSS3(64699); GAS2L1 |
| | | (10634); LIMK2(3985); SYNGR1(9145); MGAT3(4248); SREBF2 |
| | | (6721); ADPN(80339); DIP(23151); GGTLA1(2687); AP1B1(162); |
| | | MFNG(4242); NPTXR(23467); PHF21B(112885); ALG12(79087); |
| | | CXorf40A(91966); MECP2(4204); |
| hsa-miR- | 90; 3469; 913; | C1orf130(400746); CTTNBP2NL(55917); CHRNB2(1141); FDPS |
| 135b | 914; 915; 916; | (2224); DNM3(26052); RASAL2(9462); PRELP(5549); ATP2B4(493); |
| | 917; 918; 919; | CD46(4179); FLJ12505(79805); C1orf123(54987); ST7L(54879); |
| | 920; 921; 922; | F11R(50848); RGS5(8490); SYT2(127833); TMEM63A(9725); |
| | 923; 924; 925; | C1orf96(126731); C1orf198(84886); AKT3(10000); HNRPU(3192); |
| | 926; 927; 928; | SPTBN1(6711); SLC1A4(6509); ANTXR1(84168); ARHGEF4(50649); |
| | 929; 930; 931; | GULP1(51454); COL4A3(1285); RBJ(51277); MCFD2(90411); SFTPB |
| | 932; 933; 934; | (6439); MGAT4A(11320); ST6GAL2(84620); TLK1(9874); SP3(6670); |
| | 935; 1516; | PGAP1(80055); ERBB4(2066); C3orf29(64419); MOBP(4336); |
| | | BSN(8927); DTX3L(151636); MRAS(22808); NMD3(51068); MFN1 |
| | | (55669); VGLL4(9686); KIAA1143(57456); FYCO1(79443); NCKIPSD |
| | | (51517); GLT8D1(55830); ADAMTS9(56999); GBE1(2632); KEAA2018 |
| | | (205717); MGC40579(256356); IGF2BP2(10644); LRRC15(131578); |
| | | ZNF718(255403); KIAA1530(57654); KLF3(51274) ALPK1(80216); |
| | | CYP4V2(285440); CPLX1(10815); AFAP(60312); DKFZp761B107 |
| | | (91050); UGT2B15(7366); PLA2G12A(81579); NR3C2(4306); |
| | | ITGA1(3672); LOC153561(153561); TNPO1(3842); CAMK4(814); |
| | | PURA(5813); PCDHB16(57717); GM2A(2760); LSM11(134353); |
| | | CPLX2(10814); PRLR(5618); LIX1(167410); RAPGEF6(51735); |
| | | KIF3A(11127); SPOCK1(6695); ADAM19(8728); KIAA1191(57179); |
| | | LOC51149(51149); AOF1(221656); TCF19(6941); SFRS3(6428); |
| | | DAAM2(23500); APOBEC2(10930); C6orf49(29964); SLC35A1(10559); |
| | | RP5-875H10.1(389432); C6orf97(80129); QKI(9444); SSR1(6745); |
| | | ELOVL2(54898); TPMT(7172); ICK(22858); VNN3(55350); RBAK |
| | | (57786); TMEM106B(54664); CREB5(9586); UBE2D4(51619); |
| | | ADCY1(107); ZNF588(51427); BCAP29(55973); AKR1D1(6718); |
| | | SFRP4(6424); PURB(5814); PBEF1(10135); CREB3L2(64764); |
| | | ZNF596(169270); ZNF705CP(389631); ZDHHC2(51201); PI15(51050); |
| | | OTUD6B(51633); ATP6V1C1 (528); PSD3(23362); LZTS1 (11178); |

TABLE 4-73

| | | ENTPD4(9583); ASPH(444); ARC(23237); DMRT1(1761); RUSC2 |
|---|---|---|
| | | (9853); NTRK2(4915); PTPDC1(138639); SLC31A2(1318); ODF2(4957); |
| | | PSIP1(11168); C9orf82(79886); GBA2(57704); TRPM3(80036); |
| | | ZA20D2(7763); HBLD2(81689); ABCA1(19); STRBP(55342); WAC |
| | | (51322); RPP30(10556); PGAMI(5223); ENTPD7(57089); HIF1AN |
| | | (55662); TCF7L2(6934); ADARB2(105); AKR1C2(1646); DNAJC9 |
| | | (23234); KCNMA1(3778); TMEM10(93377); FLJ46300(399827); |
| | | GPIAP1(4076); ESRRA(2101); PANX1(24145); SC5DL(6309); LOC89944 |
| | | (89944); FBXO3(26273); PGM2L1(283209); PPP2R1B(5519); |
| | | LRRC23(10233); EMP1(2012); HNRPA1(3178); NUDT4(11163); |
| | | OAS2(4939); ZNF84(7637); LOC389634(389634); ITPR2(3709); |
| | | TMTC1(83857); ZNF385(25946); KCTD10(83892); RP11-367C11.1 |
| | | (145173); FLJ30707(220108); LOC440138(440138); HS6ST3(266722); |
| | | ARHGEF7(8874); EFNB2(1948); PELI2(57161); EIF2S1(1965); |
| | | JDP2(122953); GNPNAT1(64841); CHES1(1112); BCL11B(64919); |
| | | CAPN3(825); SORD(6652); SNX1(6642); THSD4(79875); RCCD1 |
| | | (91433); MYEF2(50804); CA12(771); AP3S2(10239); ABAT(18); |
| | | PDPR(55066); MGC16943(112479); TBX6(6911); SIAH1(6477); |
| | | PHLPPL(23035); KIAA1609(57707); ZCCHC14(23174); TMEM97 |
| | | (27346); CPD(1362); IGF2BP1(10642); GAS7(8522); ULK2(9706); |
| | | NUFIP2(57532); LOC201181(201181); TEX2(55852); ACOX1(51); |
| | | CEP192(55125); MBD2(8932); HCN2(610); FEM1A(55527); ZNF136 |
| | | (7695); ZNF226(7769); ZNF471(57573); LOC390980(390980); |
| | | FLJ38288(284309); GNG7(2788); ZNF100(163227); C19orf12(83636); |
| | | ZFP30(22835); ZNF28(7576); PLCB1(23236); GDAP1L1(78997); |
| | | PTPN1(5770); VAPB(9217); C20orf112(140688); TGM2(7052); |
| | | B4GALT5(9334); ATP9A(10079); STCH(6782); RUNX1(861); LOC284861 |
| | | (284861); LIMK2(3985); TNRC6B(23112); TOB2(10766); FRMPD4 |
| | | (9758); CXorf15(55787); RP1-112K5.2(90121); DIAPH2(1730); |
| | | CXorf39(139231); AFF2(2334); ATP2B3(492); PCYT1B(9468); |
| | | SMC1L1(8243); RNF12(51132); MCART6(401612); RBMX(27316); |
| hsa-miR- | 91; 936; 937; | KIF1B(23095); FAM76A(199870); KIAA1522(57648); EIF2C1(26523); |
| 136 | 938; 939; 940; | SGIP1(84251); SH3GLB1(51100); PRPF38B(55119); TXNIP(10628); |
| | 941; 942; 943; | C1orf56 (54964); SLAMF7 (57823); DDR2(4921); MPZL1(9019); |
| | 944; 945; | CAMSAP1L1(23271); ELF3(1999); OXCT2(64064); RIMS3(9783); |
| | | PIK4CB(5298); NES(10763); RIPK5(25778); NUCKS1(64710); |
| | | ENAH (55740); GREM2(64388); SLC3A1(6519); CD28(940); CREB1 |
| | | (1385); TRPM8(79054); FAM49A(81553); GFPT1(2673); PCGF1 |
| | | (84759); SF3B1(23451); KCTD18(130535); TRAK2(66008); HDAC4 |
| | | (9759); KIF1A(547); NKTR(4820); PTPRG(5793) ; KALRN(8997); |
| | | ACAD9(28976); LOC440944(440944); CMTM6(54918); USP4(7375); |
| | | IL17RD(54756); ZNF148(7707); MRPL3(11222); SLC33A1(9197); |
| | | TNIK(23043); NCBP2(22916); C1QTNF7(114905); GALNT17(4 |

TABLE 4-74

| | | 42117); STOX2(56977); UGT2B15(7366); ASAHL(27163); KLHL8 |
|---|---|---|
| | | (57563); PPA2(27068); BBS7(55212); FAM105B(90268); PIK3R1(5295); |
| | | FLJ36748(134265); MFAP3(4238); CPEB4(80315); PRLR(5618); |
| | | FLJ25680(134187) ALDH7A1(501); C5orf3(10827); TRIM52(84851); |
| | | GCNT2(2651); C6orf49(29964); RFXDC1(222546); ELOVL2 |
| | | (54898); TAP2(6891); FLJ41841(401263); PKHD1(5314); PGM3(5288); |
| | | RNGTT(8732); OSTM1(28962); RPS6KA2(6196); CREB5(9586); |
| | | UBE2D4(51619); ADCY1(107); LSM8(51691); HIP1(3092); TFEC |
| | | (22797); MTPN(136319); KIAA0773(9715); FDFT1(2222); ZNF705CP |
| | | (389631); KIAA1967(57805); DOCK5(80005); UNC5D(137970); |
| | | LRRC14(9684); VCPIP1(80124); NCOA2(10499); TPD52(7163); |
| | | NBN(4683); NTRK2(4915); MAK10(60560); C9orf47(286223); PTPDC1 |
| | | (138689); TMEM38B(55151); TRIM14(9830); ZNF518(9849); |
| | | ACADSB(36); RP11-142I17.1(26095); C10orf72(196740); SLC16A9 |
| | | (220963); MAWBP(64081); LUZP2(338645); RBM14(10432); TAGLN |
| | | (6876); MLL(4297),TMEM24(9854); STT3A(3703); OSBP(5007); |
| | | ALDH3B2(222); SHANK2(22941); UCP3(7352); RAB30(27314); |
| | | FZD4(8322); RDX(5962); TEGT(7009); RBMS2(5939); MSRB3(258827); |
| | | FLJ46688(440107); APAF1(317); FLJ11259(55332); KIAA1853 |
| | | (84530); C12orf4(57102); DUSP16(80824); SLCO1A2(6579); TMTC1 |
| | | (83857); YAF2(10138); SFRS2IP(9169); TFCP2(7024); KRT1B |
| | | (374454); AVIL(10677); CTDSP2(10106); PHLDA1(22822); FOXN4 |
| | | (121643); POP5(51367); SAP18(10284); FREM2(341640); KIAA1008 |
| | | (22894); SOCS4(122809); RAD51L1(5890); KIAA1737(85457); |
| | | FLRT2(23768); NOVA1(4857); STRN3(29966); DIO2(1734); C14orf103 |
| | | (55102); KIAA1024(23251); FLJ22795(80154); LOC440337(440337); |
| | | SNTB2(6645); GRIN2A(2903); FLJ11151(55313); XYLT1 |
| | | (64131); USP31(57478); FLJ23436(79724); FLJ43980(124149); |
| | | SLC12A4(6560), AP1G1(164); MAP2K4(6416); WSB1(26118); CENTA2 |
| | | (55803); SOCS7(30837); WDR68(10238); PRKCA(5578); C17orf77 |
| | | (146723); TRPV3(162514); UBE2G1(7326); GAS7(8522); SSH2 |
| | | (85464); RAD51L3(5892); MTMR4 (9110); ANKRD12(23253); |
| | | TNFRSF11A(8792); C18orf45(85019); ZNF440(126070); SYDE1(85360); |
| | | NFKBIB(4793); INSR(3643); GADD45GIP1(90480); ZNF160(90338); |
| | | LOC126208(126208); RIN2(54453); HM13(81502); SGK2(10110); |
| | | GGTL3(2686); CHRNA4(1137); ABCC13(150000); BRWD1(54014); |
| | | C21orf25(25966); PEX26(55670); NUP50(10762); PLP2(5355); |
| | | ZC3H12B(340554); BIRC4(331); ZPRY3(10251); PNPLA4(8228); |
| | | CRSP2(9282); SLC35A2(7355); TFE3(7030); RNF12(51132); CHM |
| | | (1121); SYTL4(94121); RP13-383K5.1(55285); HCFC1(3054); |
| hsa-miR- | 92; 946; 947; | CLIC4(25932); LEPROT(54741); DNAJB4(11080); UHMK1(127933); |
| 142-5p | 948; 949; 3470; | C1orf21(81563); CCNT2(905); ZAK(51776); ITGAV(3685); |
| | 3471; 950; 951; | BMPR2(659); RPE(6120); CDC42EP3(10602); MAP3K2(10746); GPR1 |
| | 952; 953; 954; | |

TABLE 4-75

| | | |
|---|---|---|
| | | 55(151556); KLHL24(54800); EIF4E3(317649); ROBO1(6091); |
| | | DCBLD2(131566); MGC40579(256356); EIF5A2(56648); PAICS |
| | | (10606); ELMOD2(255520); GAB1(2549); EPHA5(2044); ARSJ(79642); |
| | | ASAP(79884); MEGF10(84466); LOC153222(153222); HMGCS1 |
| | | (3157); TRIM36(55521); FEM1C(56929); AFF4(27125); PRPF4B |
| | | (8899); SLC35A1(10559); QKI(9444); FGFR1OP(11116); GLO1(2739); |
| | | ICK(22858); BVES(11149); AHR(196); LOC441257(441257); MKLN1 |
| | | (4289); MAGI2(9863); TFEC(22797); CNOT4(4850); ZFPM2(23414); |
| | | PSD3(23362); TMEM38B(55151); ARL5B(221079); PTEN(5728); |
| | | TRUB1(142940); LOC399947(399947); UBE4A(9354); EVA1 |
| | | (10205); CHST11(50515); RERG(85004); SOX5(6660); BHLHB3 |
| | | (79365); SLC6A15(55117); SLC41A2(84102); RFP2(10206); SPG20 |
| | | (23111); TBC1D4(9882); FLJ10154(55082); CHRNA7(1139); ALPK3 |
| | | (57538); FLJ20582(54989); MKL2(57496); DREV1(51108); PRKCB1 |
| | | (5579); NFAT5(10725); FAM18B(51030); RHOT1(55288); RNF138 |
| | | (51444); CTAGE1(64693); ZNF264(9422); SFRS6(6431); CBLN4 |
| | | (140689); SLC5A3(6526); DIAPH2(1730) ; CXorf39(139231); |
| | | SLC9A6(10479); SPRY3(10251); ZDHHC15(158866); ARHGEF6(9459); |
| hsa-miR- | 93; 955; 961; | SAMD11(148398); PRKAA2(5563); SDHC(6391); C1orf106(55765); |
| 146a | 956; 962; 957; | PPP1R12B(4660); SYT14(255928); FBXO28(23219); PTAFR(5724); |
| hsa-miR- | 3472; 958; 963; | BSDC1(55108); SORT1(6272); ST7L(54879); LPGAT1(9926); PRKCE |
| 146b | 659; 964; 3473; | (5581); SEMA4F(10505); NRP2(8828); COL4A3(1285); COPS8 |
| | 965; 960; 966; | (10920); ADAM17(6868); KIAA1715(80856); PDE11A(50940); |
| | 94; | KLF7(8609); LANCL1(10314); ERBB4(2066); SLC19A3 (80704); |
| | | SLC16A14(151473); TIGD1(200765); CRTAP(10491); CCBP2(1238); |
| | | ZNF662(389114); IL17RB(55540); IGSF4D(253559); KALRN(8997); |
| | | SRPRB(58477); SCN5A(6331); LRRC15(131578); PDGFRA(5156); |
| | | PAICS(10606); MOBKL1A(92597); CDS1(1040); RPL34(6164); |
| | | WWC2(80014); WDFY3(23001); FAM105B(90268); LOC441070(441070); |
| | | SERF1A(8293); UTP15(84135); RHOBTB3(22836); RGMB(285704); |
| | | NDST1(3340); GPX3(2878); ARL10(285598); NSD1(64324); SQSTM1 |
| | | (8878); KLHL3(26249); C5orf4(10826); RNF8(9025); C6orf68 |
| | | (116150); TRAM2(9697); DJ22O8.2(57226); TSPYL1(7259); |
| | | ZBTB2(57621); TFB1M(51106); ITGB8(3696); ZNRF2(223082); |
| | | EGFR(1956); ZNF138(7697); GATAD1(57798); CALU(813); LOC90639 |
| | | (90639); JAZF1(221895); H-plk(51351); DLGAP2(9228); ZNF705CP |
| | | (389631); ZDHHC2(51201); UNC5D(137970); C8orf72(90362); |
| | | PHF20L1(51105); SLC1A1(6505); MTAP(4507); NTRK2(4915); |
| | | C9orf47(286223); C9orf28(89853); C9orf72(203228); C9orf10OS |
| | | (158293); TRIM14(9830); ZNF482(10773); CUGBP2(10659); EIF4EBP2 |
| | | (1979); RAI17(57178); LRRC27(80313); CCDC6(8030); TMEM10 |
| | | (93377); COX15(1355); KIAA1914(84632); PDZD8(118987); TUB |
| | | (7275); DKFZp686O24166(374383); LRRC55(219527); OR9Q1(2 |

TABLE 4-76

| | | |
|---|---|---|
| | | 19956); TRAF6(7189); SYT13(57586); CTSC(1075) PPP2R1B(5519); |
| | | SCN3B(55800); KCNA6(3742); PDE3A(5139); RBMS2(5939); CLLU1 |
| | | (574028); KIAA0152(9761); BHLHB3(79365); SLC38A1 (81539); |
| | | FMNL3(91010); LOC144501(144501); TIMELESS(8914); DP |
| | | Y19L2(283417) CPM(1368); SLC6A15(55117); FBXO21(23014); |
| | | ZNF605(90462); HSMPP8(54737); KLF12(11278); C13orf10 |
| | | (64062); LOC283487(283487); FANCM(57697); ARF6(382); PPP2R5C |
| | | (5527); TM9SF1(10548); NOVA1(4857); SIX4(51804); VTI1B |
| | | (10490); SLCO3A1(28232); LRRK1(79705); RASGRP1(10125); IDH2 |
| | | (3418); MGRN1(23295); CDH1(999); PSMD7(5713); ADCY9(115); |
| | | GRIN2A(2903); USP31(57478); ANKRD13B(124930); SAP30BP |
| | | (29115); TBC1D3C(414060); PPARBP(5469); GJA7(10052); ZNF652 |
| | | (22834); B3GNTL1(146712); C18orf1(753); DTNA(1837); |
| | | TXNDC10(54495); PARD6G(84552); ZNF253(56242); ZNF257 |
| | | (113835); APOE(348); HIF3A(64344); FLJ16542(126017); FLJ00060 |
| | | (90011); GTF2F1(2962); HAPLN4(404037); PRX(57716); ZNF229 |
| | | (7772); ITCH(83737); SFRS6(6431); STK4(6789); SIRPB1(10326); |
| | | C20orf42(55612); GM632(57473); POFUT2(23275); ST13 |
| | | (6767); ZC3H12B(340554); BCORL1(63035); SLC9A6(10479); |
| | | GPM6B(2824); CUL4B(8450); IRAK1(3654); |
| hsa-miR- | 95; 967; 3474; | PER3(8863); DDR2(4921); AKT3(10000); TMEM87B(84910); ACVR2A |
| 181a | 968; 969; 970; | (92); GLS(2744); CREB1(1385); GFPT1(2673); ZNF514(84874); |
| | 971; 972; 973; | CLASP1(23332); FIGN(55137); KIAA1715(80856); PGAP1 |
| | 974; 975; 976; | (80055); CTDSPL(10217); SELT(51714); ATP2B2(491); RASSF1 |
| | 977; 978; 979; | (11186);FOXP1(27086); MINA(84864); CPOX(1371); KPNA1(3836); |
| | 980; 981; 982; | XRN1(54464); TRIM2(23321); TLL1(7092); GABRG1(2565); |
| | 983; 984; 985; | GABRA4(2557); TIFA(92610); PDE5A(8654); SLC7A11(23657); |
| | 986; 987; 988; | FAM105B(90268); TNPO1(3842); ARHGAP26(23092); CPEB4(80315); |
| | 989; 990; 991; | MTMR12(54545); PRLR(5618); KIF3A(11127); RNF8(9025); |
| | 992; 993; 994; | TBPL1(9519);ATXN1(6310); TMEM106B(54664); CREB5(9586); |
| | 995; 996; 997; | ZNF655(79027);MKLN1(4289); OSBPL3(26031); PERQ1(64599); |
| | 998; 999; 1000; | DLGAP2(9228); UNC5D(137970); PHF20L1(51105); PPP1R3B(79660); |
| | 1001; 1002; 1003; | GDA(9615); FSD1CL(405752); FCMD(2218); ROD1(9991); |
| | 1004; 1005; 1006; | PRKG1(5592); C10orf22(84890); ASAH2(56624); ZNFN1A5(64376); |
| | 1007; 1008; 1009; | GPIAP1(4076); EHF(26298); MLL(4297); HBXAP(51773); |
| | 1010; 1011; 1012; | SESN3(143686); ETS1(2113); LARP4(113251); BRI3BP(140707); |
| | 1013; 1014; 1015; | JARID1A(5927); KIAA0528(9847); KRAS(3845); IPO8(10526); |
| | 1016; 1517; 1518; | KIAA0286(23306); KCTD10(83892); BRAP(8315); ATP8A2(51761); |
| | 1519; | RFC3(5983); FLJ40296(122183); ARHGEF7(8874); C13orf10 |
| | | (64062); FBXO34(55030); ATXN3(4287); GOLGA8E (390535); |
| | | GOLGA8G(283768); LOC440295(440295); C15orf29(79768); |
| | | TTBK2(146057); PRTG(283659); CSNK1G1(53944); AYTL1(54947); |
| | | NFAT5(10725); FLJ131875(197320); GRIN2A(2903); DYNC1LI2 |
| | | (1783); PHLPPL(23035); AP1G1(16 |

TABLE 4-77

| | | |
|---|---|---|
| | | 4); KIAA0195(9772); ZBTB4(57659); TNFRSF11A(8792); LMAN1 |
| | | (3998); ZADH2(284273); ZNF559(84527); ZNF440(126070); |
| | | ZNF439(90594); ZNF253(56242); CEBPG(1054); ZNF568(374900); |
| | | ZNF17(7565); ZNF586(54807); ZNF44(51710); MGC71805(403113); |
| | | KIAA1559(57677); FLJ37549(163116); LOC163131(163131); |
| | | LOC284323(284323); ZNF83(55769); ZNF468(90333); |
| | | ENTPD6(955); FKBP1A(2280); RASSF2(9770); NAPB (63908); |
| | | BRWD1(54014); HIC2(23119); TNRC6B(23112); CBX7(23492); |
| | | TBL1X(6907); DDX3X(1654); ZNF673(55634); AFF2(2334); |
| | | RP11-130N24.1(340533); DDX3Y(8653); |
| hsa-miR- | 96; 1017; 1018; | H6PD(9563); BNIPL(149428); PPP1R12B(4660); AMIGO1(57463); |
| 182* | 3475; 3476; | C1orf198(84886); G6PC2(57818); FAM49A(81553); ALS2CR15 |
| | | (130026); OGG1(4968); DLEC1(9940); FYCO1(79443); TMCC1 |
| | | (23023); CCRN4L(25819); LOC441046(441046); ANKRD50(57182); |
| | | FLJ41603(389337); MFAP3(4238); UBXD8(23197); PLCXD3(345557); |
| | | HCN1(348980); MTX3(345778); HLA-A(3105); SLC16A10(117247); |
| | | KIAA0319(9856); TMEM30A(55754); BVES(11149); CYCS(64205); |
| | | FBXL6(26233); PALM2(114299); BAG1(573); CUGBP2(10659); |
| | | ARID5B(84159); ENTPD7(57089); TMEM26(219623); TRIM44(54765); |
| | | SLC1A2(6506); FLJ20625(55004); WNK1(65125); FLJ22028 |
| | | (79912); MDM2(4193); KRAS(3845); MMP19(4327); ATP8A2(51761); |
| | | C14orf130(55148); BDKRB2(624); SALL2(6297); CALML4(91860); |
| | | LSM16(80153); UBE21(7329); RFWD3(55159); ACACA(31); |
| | | GIPC3(126326); ZNF709(163051); GYS1(2997); DNAJC5(80331); |
| | | DSCR6(53820); GTPBP1(9567); HPS4(89781); SYN1(6853); DAZ2 |
| | | (57055); |
| hsa-miR- | 97; 1019; 1020; | KIF1B(23095); VANGL1(81839); MAPKAPK2(9261); C1orf96 |
| 183 | 1021; 1022; 1023; | (375057); THEM4(117145); MUC1(4582); C1orf116(79098); ENAH |
| | 1024; 1025; 1026; | (55740); ZNF496(84838); HTLF(3344); HTRA2(27429); TMEM87B |
| | 1027; 1028; 1029; | (84910); PTPN4(5775); ACVR2A(92); CTDSP1 (58190); FLJ21945 |
| | 1030; 1031; 1032; | (80304); FLJ13646(79635); MGC4268(83607); ATF2(1386); EPHA4 |
| | 1033; 1034; | (2043); CTDSPL(10217); ZNF662(389114); LIMD1(8994); ROBO2 |
| | | (6092); SLC25A36(55186); PIK3CA(5290); KLHL24(54800); ZNF445 |
| | | (353274); NME6(10201); WNT5A(7474); TOMM70A(9868); RAB6B |
| | | (51560); TMEM34(55751); DKFZp761B107(91050); FAT(2195); |
| | | PHF15(23338); PCDHA9(9752); ARHGAP26(23092); MST150(85027); |
| | | MFAP3(4238); LSM11(134353); P18SRP(285672); KLHL3(26249); |
| | | IRF4(3662); LOC401252(401252); PTP4A1(7803); SH3BGRL2 |
| | | (83699); AKAP12(9590); QKI(9444); RP11-145H9.1(340156); |
| | | HLA-DOA(3111); COL12A1(1303); TSPYL4 (23270); UBE2D4 |
| | | (51619); TRIM24(8805); CYCS(54205); VPS37A(137492); SLC30A8 |
| | | (169026); MAL2(114569); IMPAD1(54928); FBXO32(114907); |
| | | NTRK2(4915); TRIM32(22954); MCART1(92014); CDC14B(8555); |
| | | ANKS6(2 |

TABLE 4-78

| | | 03286); ABCA1(19); ROD1(9991); WDR37(22884); CUGBP2(10659); |
|---|---|---|
| | | UNC5B(219699); SFTPA1(6435); C10orf129(142827); SUFU(51684); |
| | | PDCD4(27250); TCF7L2(6934); ITGB1(3688); AMID(84883); |
| | | SFTPA2(6436); GPAM(57678); CBL(867); LOC283219(283219); |
| | | FKBP4(2288); ACVR1B(91); NUDT4(11163); TMPO(7112); OAS3 |
| | | (4940); NRIP2(83714); SLCO1A2(6579); CPM(1368) ZNF605(90462); |
| | | FOXO1A(2308); FRMD6(122786); CHX10(338917); KIAA0284 |
| | | (283638); TM9SF1(10548); DDHD1(80821); RAB15(376267); TTC7B |
| | | (145567); BCL11B(64919); TPM1(7168); PML(5371); KIAA1024 |
| | | (23251); CALML4(91860); RAB40C(57799); ABAT(18); CP110(9738); |
| | | EXOSC6(118460); STXBP4(252983); KCTD2(23510); TBC1D3C |
| | | (414060); VAT1(10493); APPBP2(10513); ABCA8(10351); RNMT |
| | | (8731); WDR7(23335); C18orf45(85019); SMAD2(4087); GLT25D1 |
| | | (79709); HIF3A(64344); ZNF551(90233); EEF2(1938)EMR3(84658); |
| | | OR7A5(26659); LOC284296(284296); SLC9A8(23315); C20orf177 |
| | | (63939); DIP2A(23181); LOC400924(400924); MGC16703(113691); |
| | | NPTXR(23467); MSL3L1(10943); OGT(8473); SLC16A2(6567); |
| | | ARMCX4(158947); OPHN1(4983); ZDHHC15(158866); CD99L2(83692); |
| hsa-miR- | 98; 1035; 1036; | DNAJC16(23341); INPP5B(3633); KLF7(8609); C5orf20(140947); |
| 187 | 1037; 1038; 1039; | ABO(28); ATP11A(23250); ADCY9(115); PTRF(284119); INSR(3643); |
| | 1040; 1041; 1042; | ELAVL3(1995); DSCAM(1826); C21orf25(26966); LOC440836 |
| | 1043; 1044; 1045; | (440836); A2M(2); ABL2(27); ACHE(43); ADCY1(107); ALDH3B1 |
| | 1046; 1047; | (221); ALDH3B2(222); AQP4(361); ARRB1(408); ART1(417); ATP2B4 |
| | | (493); ATP4A(495); BAI1(575); CCND1(595); BCL6(604); C1S |
| | | (716); C2(717); CA12(771); CAPZB(832); CASP8(841); CBLBC |
| | | (868); CD3D(915); SCARB2(950); CHAD(1101); CLN5(1203); CNR2 |
| | | (1269); CPM(1368); CRMP1(1400); CRX(1406); SLC25A10(1468); |
| | | CYP8B1(1582); DAB2(1601); DHCR24(1718); DMWD(1762); E2F1 |
| | | (1869); EEF2(1938); EFNB2(1948); EIF2S1(1965); EPB41L1(2036); |
| | | EPHB2(2048); ERG(2078); ETS1(2113); ETV5(2119); F11(2160); |
| | | FBLN(22199); FGF9(2254); FLNC(2318); GAGE2(2574); GAGE4 |
| | | (2576); GATA4(2626); GBX2(2637); GLS(2744); GNA11(2767); GSR |
| | | (2936); HPCA(3208); HRH1(3269); NDST1(3340); HTR2C(3358); |
| | | IGF1R(3480); INPPL1(3636); ITGA4(3676); ITPR2(3709); KIR2DL1 |
| | | (3802); KIR2DL3(3804); KIR2DL4(3805); KIR2DS4(3809); LAMP2 |
| | | (3920); LEPR(3953); LLGL2(3993); LMX1A(4009); SMAD1(4086); |
| | | MAOA(4128); MAP1B(4131); MNT(4335); MOCS1(4337); MTAP |
| | | (4507); TRIM37(4591); MYD88(4615); MYH10(4628); MYH11(4629); |
| | | MYO1D(4642); NDUFB5(4711); NFATC4(4776); NFX1(4799); |
| | | NR4A2(4929); ODC1(4953); P2RX7(5027); PARK2(5071); |
| hsa-miR- | 99; 1048; 1049; | CDC7(8317); ATP1A2(477); SOAT1(6646); TOR1AIP1(26092); CR1 |
| 192 | 1050; 1051; 1052; | (1378); C1orf107(27042); C1orf163(65260); SLC19A2(10560); |
| hsa-MiR- | 1053; 1054; 1055; | C1 |
| 215 | 1056; 100; 1057 | |

TABLE 4-79

| | | |
|---|---|---|
| | ; 1058; 1059; | orf24(116496); LIMS1(3987); FLJ13646(79635); CUL3(8452); |
| | 1060; 1061; 1062; | LIMD1(8994); B3GALT3(8706); WIG1(64393); SERF1A(8293); SGCD |
| | 1063; 1064; 1065; | (6444); SMA4(11039); MCC(4163); ANKS1A(23294); ESR1(2099); |
| | 1066; | SYNCRIP(10492); TMEM106B(54664); CYCS(54205); ZC3HAV1 |
| | | (56829); AP3M2(10947); HOOK3(84376); UBE2V2(7336); NTRK2 |
| | | (4915); C9orf47(286223); STRBP(55342); PCGF5(84333); ENTPD7 |
| | | (57089); ACADSB(36); C10orf72(196740); SC5DL(6309); RNF141 |
| | | (50862); DDX6(1656); KIAA1467(57613); LIN7A(8825); DICER1 |
| | | (23405); ARNT2(9915); CLUAP1(23059); CARD15(64127); RFWD3 |
| | | (55159); CNP(1267); PIP5K2B(8396); KCNA7(3743); GGTL3(2686); |
| | | BRWD1(54014); BIRC4(331); CRSP2(9282); |
| hsa-miR- | 101; 1067; 3477; | PRKAA2(5563); ZNF326(284695); SLC22A15(55856); RALGPS2 |
| 200a* | 1068; 1520; | (55103); TTC22(55001); SHE(126669); NUP133(55746); IRF2BP2 |
| | | (359948); UGCGL1(56886); GLS(2744); RBJ(51277); SFRS7 |
| | | (6432); RAB1A(6861); MGAT4A(11320); AFF3(3899); SP3(6670); |
| | | C2orf11(130132); SMC4L1(10051); KLHL24(54800); THRB(7068); |
| | | MAGI1(9223); VGLL3(389136); MAK3(80218); SNX4(8723); WHSC1 |
| | | (7468); RBPSUH(3516); LARP2(55132); GAB1(2549); ATP8A1(10396); |
| | | UGT2A3(79799); IL7R(3575); GTF2H2(2966); SMAD5(4090); |
| | | ARHGAP26(23092); CNOT8(9337); C6orf120(387263); ZNF323 |
| | | (64288); CNR1(1268); STX7(8417); TXLNB(167838); SHPRH(257218); |
| | | FZD1(8321); IGF2BP3(10643); JAZF1(221895); SEMA3E(9723); |
| | | TFEC(22797); SLC7A2(6542); GDAP1(54332); OTUD6B(51633); |
| | | TNFRSF10B(8795); FGFR1(2260); NTRK2(4915); UBQLN1(29979); |
| | | ZNF367(195828); ARL5B(221079); STK38L(23012); KITLG(4254); |
| | | FLJ20674(54621); LOC440138(440138); RAP2A(5911); DCAMKL1 |
| | | (9201); PPM1A(5494); PLDN(26258); PIGB(9488); TP53BP1(7158); |
| | | BTBD1(53339); CD2BP2(10421); MGC19764(162394); CRLF3 |
| | | (51379); SFRS1(6426); ZNF396(252884); MBP(4155); CYP4F3(4051); |
| | | ZNF430(80264); ZNF493(284443); ZNF254(9534); ZNF43(7594); |
| | | RAB22A(57403); SLC5A3(6526); C21orf91(54149); APOL6(80830); |
| | | PITPNB(23760); MAOA(4128); PIGA(5277); AMMECR1(9949); |
| hsa-miR- | 102; 3478; 1069; | KIF1B(23095); EIF2C1(26523); CMPK(51727); RALGPS2(55103); |
| 216 | 1070; 1071; 1072; | KIAA0319L(79932); RP5-998N21.6(440686); C1orf55(163859); |
| | 1073; 1074; 1075; | TAF5L(27097); CHML(1122); EML4(27436); MGC5509(79074); |
| | 1076; 1077; 1078; | ALS2CR13(150864); MCFD2(90411); TIA1(7072); IGSF4D(253559); |
| | 1079; 1080; 1081; | LPP(4026); KIAA2018(205717); WHSC1(7468); UGT2B10(7365); |
| | | SGCD(6444); ST8SIA4(7903); MCC(4163); KIAA1961(96459); NR3C1 |
| | | (2908); TMEM106B(54664); MKLN1(4289); FLJ36031(168455); |
| | | CNOT4(4850); ZNF705CP(389631); ZBTB5(9925); WDR31(114987); |
| | | RAB18(22931); TEAD1(7003); FLJ22028(79912); CBX5(23468); |
| | | KLF12(11278); C14orf111(51077); EXOC5(10640); ZFP106(64397); |
| | | DMXL2(23312); DOK6(220164); AQP4(361); BCL2(596); ZNF417( |

TABLE 4-80

| | | |
|---|---|---|
| | | 147687); ACOX1(51); ADCY5(111); ADRB1(153); AMD1(262); APOE |
| | | (348); ARNT(405); BDH1(622); CACNB4(785); CAPN6(827); CAPZA2 |
| | | (830); CAV2(858); CBL(867); CCNG2(901); CCNT2(905); TNFSF8 |
| | | (944); CD59(966); CTSC(1075); CHES1(1112); DIO2(I734); EEF1A1 |
| | | (1915); EIF2S3(1968); ETF1(2107); ETV6(2120); GALK2(2585); |
| | | GANC(2595); LRRC32(2615); HTR4(3360); KCNJ14(3770); KCNS1 |
| | | (3787); LIFR(3977); LRPAP1(4043); SMAD2(4087); MBP(4155); |
| | | MME(4311); NAP1L1(4673); NMT1(4836); NT5E(4907); OAS3 |
| | | (4940); OPRK1(4986); PPAT(5471); PPM1B(5495); PPP2R1B(5519); |
| | | PRKAR1A(5573); PRKCE(5581); PRPS1(5631); PTGIS(5740); PTK7 |
| | | (5754); PURB(5814); RBBP5(5929); RHO(6010); RPL37(6167); |
| | | RSU1(6251); SLC1A2(6506); SLC13A1(6561); SOX1(6656); SOX11 |
| | | (6664); |
| hsa-miR- | 103; 1082; 1083; | SAMD11(148398); NPAL3(57185); CLIC4(25932); MOV1O(4343); |
| 217 | 1084; 1085; 1086; | ATP1B1(481); MFSD4(148808); DTL(51514); FLVCR(28982); |
| | 1087; 1088; 1089; | PROX1(5629); RAB4A(5867); KIAA0133(9816); FUSIP1(10772); |
| | 1090; 1091; 1092; | ZA20D1(56957); MCL1(4170); MRPL9(65005); GPATC4(54865); |
| | | SLAMF6(114836); IVNS1ABP(10625); YOD1(55432); SLC30A1(7779); |
| | | PTPN14(5784); LBR(3930); ENAH(55740); SOX11(6664); GRHL1 |
| | | (29841); SELI(85465); SLC30A6(55676); SLC3A1(6519); RY1 |
| | | (11017); MXD1(4084); C2orf26(65124); INSIG2(51141); SFT2D3 |
| | | (84826); ACVR2A(92); NAB1(4664); HRB(3267); ASB1(51665); |
| | | KIF3C(3797); PRKD3(23683); BCL11A(53335); KIAA1715(80856); |
| | | FLJ13946(92104); ALS2CR15(130026); USP37(57695); ITGA9(3680); |
| | | SLC15A(26565); HPS3(84343); DCBLD2(131566); WHSC1(7468); |
| | | FLJ35725(152992); ATP8A1(10396); EPHA5(2044); GRSF1(2926); |
| | | FLJ38991(285521); PDE5A(8654); LOC201725(201725); MARVELD2 |
| | | (153562); GTF2H2(2966); MAP1B(4131) SCAMP1(9522); DCP2 |
| | | (167227); FLJ37562(134553); RICTOR(253260); DKFZP781I1119 |
| | | (166968); ACOT12(134526); RAPGEF6(51735); TIGD6(81789); C6orf69 |
| | | (222658); PTP4A1(7803); FOXO3A(2309); TCF21(6943); GPR126 |
| | | (57211); C6orf71(389434); HIST1H3J(8356); C6orf125(84300); |
| | | ICK(22858); C6orf152(167691); CDC2L6(23097); STX7(8417); |
| | | AGPAT4(56895); PDE10A(10846); T(6862); ARL4A(10124); CREB5 |
| | | (9586); CHN2(1124); Ells1(222166); ANLN(54443); ZNF92(168374); |
| | | PMPCB (9512); CFTR(1080); INHBA(3624); ZNF680(340252); |
| | | STX1A(6804); YWHAG(7532); SAMD9(54809); EZH2(2146); DLGAP2 |
| | | (9228); SPFH2(11160); HNF4G(3174); CA13(377677); DPY19L4 |
| | | (286148); POP1(10940); RIMS2(9699); CHRAC1(54108); C8orf42 |
| | | (157695); TEX15(56154); FGFR1(2260); FAM49B(51571); ASAH3L |
| | | (340485); GCNT1(2650); MAK10(60560); PTPDC1(138639); PALM2- |
| | | AKAP2(445815); RALGPS1(9649); MCART1(92014); EDG2(1902); |
| | | ROD1(9991); SETX(23064); SIRT1(23411); HECTD2(143279); NE |

TABLE 4-81

| | | |
|---|---|---|
| | | URL(9148); HTRA1(5654); SFMBT2(57713); DNMT2(1787); LOC387646 |
| | | (387646); SYT15(83849); ERCC6(2074); PCDH15(65217); |
| | | SPOCK2(9806); KIAA0261(23063); ARHGAP19(84986); SH3PXD2A |
| | | (9644); FGFR2(2263); TMEM16C(63982); STX3A(6809); PHCA |
| | | (55331); FUT4(2526); SRP46(10929); LOC399947(399947); SNF1LK2 |
| | | (23235); MLL(4297); TBRG1(84897); CD59(966); SLC1A2(6506); |
| | | PGM2L1(283209); FZD4(8322); ARID2(196528); MON2(23041); |
| | | TBC1D15(64786); TDG(6996); OAS3(4940); DENR(8562); CLEC7A |
| | | (64581); ST8SIA1(6489); KRAS(3845); SLC38A2(54407); SENP1 |
| | | (29843); ATF7(11016); EEA1(8411); FBXO21(23014); RFP2(10206); |
| | | KLF5(688); LMO7(4008); C13orf6(84945); XPO4(64328); C13orf3 |
| | | (221150); UBL3(5412); DCAMKL1(9201); DACH1(1602); KCTD12 |
| | | (115207); AKAP6(9472); PPM1A(5494); C14orf118(55668); FLJ11806 |
| | | (79882); JPH4(84502); NOVA1(4857); PPP2R5E(5529); TMOD2 |
| | | (29767); THSD4(79875); LOC440295(440295); TMEM83(145978); |
| | | NIPA1(123606); TTBK2(146057); WDR72(256764); VPS13C(54832); |
| | | CSNK1G1(53944); CIITA(4261); IL21R(50615); CDH1(999); NFAT5 |
| | | (10725); ASCIZ(23300); GRIN2A(2903); GSPT1(2935); ABCC6 |
| | | (368); MGC10992(92922); CMTM4(146223); MAF(4094); NF1(4763); |
| | | ZNF207(7756); PPM1E(22843); TLK2(11011); AKAP10(11216); |
| | | SEPT4(5414); APPBP2(10513); KIAA1287(57508); C18orf1(753); |
| | | ZCCHC2(54877); DSC2(1824); MRO(83876); MBD2(8932); PQLC1 |
| | | (80148); GATAD2A(54815); ZNF568(374900); ZNF708(7562); |
| | | ZNF571(51276); ZNF616(90317); CSRP2BP(57325); RIN2(54453); |
| | | RAB22A(57403); ATP9A(10079); DIDO1(11083); ABCC13(150000); |
| | | ADAMTS5(11096); RUNX1(861); BRWD1(54014); MAPK1(5594); |
| | | ZNF70(7621); DDX17(10521); SULT4A1(25830); WWC3(55841); |
| | | PDHA1(5160); MBTPS2(51360); ZNF673(55634); RIBC1 (158787); |
| | | OGT(8473); OCRL(4952); PRKX(5613); RNF12(51132); RAB9B |
| | | (51209); SUHW3(55609); ATP11C(286410); |
| hsa-miR- | 104; 1093; 1094; | TNFRSF1B(7133); WNT9A(7483); THRB(7068); GPX1(2876); WHSC1 |
| 220 | 1095; | (7468); RGMB(285704); TBC1D22B(55633); MAFK(7975); FOXK1 |
| | | (221937); MAF1(84232); FREQ(23413); IPPK(64768); FLJ459 |
| | | 83(399717); CTTN(2017); FLJ42258(440049); hCAP-D3(28310); |
| | | C14orf153(84334); TLN2(83660); ABR(29); C17orf62(79415); |
| | | SIPA1L3(23094); BTBD4(140685); NDUFV3(4731); PDXK(8566); |
| | | ADARB1(104); NF2(4771); ACP1(52); ACTN1(87); ACTN2(88); ADCY1 |
| | | (107); ADM(133); ADRA1B(147); AFP(174); ANK1(286); APOE(348); |
| | | PHOX2A(401); ARRB1(408); ARVCF(421); ATF3(467); ATP2A3(489); |
| | | KIF1A(547); BCR(613); BDKRB2(624); BMP7(655); BST2(684); |
| | | PTTG1IP(754); CACNA1D(776); CAMK2A(815); CAMK2B(816); RUNX1T1 |
| | | (862); CD28(940); SCARB1(949); CD79B(974); CHRM1(1128); |
| | | CHRNA4(1137); CHRNA7(1139); CLCN4(1183); CRKL(1399 |

TABLE 4-82

| | | |
|---|---|---|
| | | ); SLC25A10(1468); CST3(1471); DBH(1621); DDX11(1663); |
| | | E2F3(1871); E2F6(1876); ERBB4(2066); FANCA(2175); FGF9 |
| | | (2254); FGFR1(2260); FHL3(2275); FKBP4(2288); GHRH |
| | | (2691); GJB3(2707); GM2A(2760); GOLGA1(2800); MCHR1 |
| | | (2847); GPR30(2852); GRB10(2887); GRM6(2916); GTF3C1 |
| | | (2975); HD(3064); HIP1(3092); HK3(3101); HOXA5(3202); |
| | | DNAJB2(3300); IGFBP3(3486); IL1R1(3554); IL6R(3570); |
| | | IL13RA1(3597); INCENP(3619); INPP5D(3635); INSM1(3642); |
| | | ITGA9(3680); JUP(3728); KCNC1(3746); KCNJ5(3762); KCNQ1 |
| | | (3784); KCNQ2(3785); KNS2(3831); KTN1(3395); LRCH4(4034); |
| hsa-miR-222 | 105; 1096; 1097; 1098; | CAMTA1(23261); PRDM2(7799); NBPF3(84224); NSUN4(387338); |
| | 1099; 3479; 1100; 1101; | MPZL1(9019); DNM3(26052); NAV1(89796); FBXO28(23219); |
| | 1102; 1103; 1104; 1105; | RIMS3(9783); SORT1(6272); ZBTB41(360023); ENAH(55740); |
| | | SPTBN1(6711); MGC5509(79074); ACTR3(10096); HRB(3267); |
| | | KIAA1212(55704); FLJ16008(339761); ARL5A(26225); CAPN7 |
| | | (23473); STAC(6769); ITGA9(3680); KLHL18(23276); IL17RB |
| | | (55540); TFG(10342); AADAC(13); CLDN11(5010); VGLL4(9686); |
| | | SLC4A7(9497); PRKAR2A(5576); AER61(285203); SNX4(8723); |
| | | C4orf12(404201); UGT2B15(7366); NAP1L5(266812); MARVELD2 |
| | | (153562); MFAP3(4238); GABRA1(2554); C6(729); PLCXD3 |
| | | (345557); PANK3(79646); C6orf151(154007); RBM24(221662); |
| | | ZNF192(7745); HLA-DQA1(3117); RP11-145H9.1(340156); ATXN1 |
| | | (6310); TRAM2(9697); OSTM1(28962); CDC2L6(23097); HBS1L |
| | | (10767); EGFR(1956); ADAM22(53616); ZNF655(79027); IFRD1 |
| | | (3475); OSBPL3(26031); SCAP2(8935); GRB10(2887); KBTBD11 |
| | | (9920); LRRCC1(85444); ZNF704(619279); TRIM14(9830); |
| | | RAB18(22931); SAMD8(142891); FAM35A(54537); HECTD2 |
| | | (143279); ENTPD7(57089); DNMT2(1787); CXCL12(6387); |
| | | MARCH8(220972); CPEB3(22849); ZFP91(80829); MLL(4297); |
| | | PDGFD(80310); CDKN1B(1027); PLXNC1(10154); CUTL2(23316); |
| | | FLJ46363(400002); C13orf10(64062); SOCS4(122809); KTN1 |
| | | (3895); RGS6(9628); THBS1(7057); TCF12(6938); NIPA1 |
| | | (123606); RFXDC2(64864); CP110(9738); SBK1(388228); |
| | | MIS12(79003); NXN(64359); AXIN2(8313); FVT1(2531); ZADH2 |
| | | (284273); ZNF181(339318); VAPB(9217); DYRK1A(1859); CRKL |
| | | (1399); LOC401620(401620); AMMECR1(9949); CLIC2(1193); |
| hsa-miR-223 | 106; 1106; 1107; 1108; | LMO4(8543); CHRNB2(1141); DAB1(1600); SH2D1B(117157); |
| | 1109; 1110; 1111; 1112; | DUSP10(11221); GREB1(9687); RHOB(388); CRIM1(51232); |
| | 1113; 1114; 1115; 1116; | SEPT2(4735); WDR35(57539); RGPD5(84220); CCR9(10803); |
| | 1117; 1118; 1119; | ECT2(1894); PIK3CA(5290); LOC401052(401052); ZFYVE20 |
| | | (64145); KPNA1(3836); GUF1(60558); SLC4A4(8671); FGF2 |
| | | (2247); ATP8A1(10396); FBXW7(55294); KIAA1909(153478); |
| | | APC(324); ANKH(56172); PRLR(5618); IL6ST(3572); MEF2C |
| | | (4208); GRM6(2916); PRDM1(639); HECA(51696); VNN1(8876); |
| | | AGPAT4(56895); LSM8(51691); P |

TABLE 4-83

| | | |
|---|---|---|
| | | URB(5814); MSR1(4481); MAK10(60560); C9orf96(169436); |
| | | PSIP1(11168); PHF19(26147); ARID5B(84159); NEBL(10529); |
| | | CD59(966); MGC24039(160518); YAF2(10138); ZNF641(121274); |
| | | SLC11A2(4891); CBX5(23468); FLJ20674(54621); FLJ39378 |
| | | (353116); FLJ38725(144811); RAP2A(5911); FOXO1A(2308); |
| | | KPNA3(3839); KLF12(11278); FLJ11806(79882); SPTLC2(9517); |
| | | DIO2(1734); TTBK2(146057); UBR1(197131); NARG2(79664); |
| | | CALML4(91860); ADCY7(113); PITPNA(5306); DHX33(56919); |
| | | AP1GBP1(11276); CDC27(996); ANKRD40(91369); TRIM37(4591); |
| | | RNMT(8731); DSG2(1829); SETBP1(26040); IXL(55588); INSR |
| | | (3643); CCDC8(83987); C21orf29(54084); PPARA(5465); RIBC1 |
| | | (158787); OGT(8473); CXorf39(139231); SNX12(29934); RP13- |
| | | 383K5.1(55285); SEPT6(23157); CYorf15B(84663); |
| hsa-miR-224 | 107; 1120; 1121; 1122; | KIF1B(23095); PQLC2(54896); LRRC8C(84230); GNAI3(2773); |
| | 1123; 1124; 1125; 1126; | FAM46C(54855); PPP1R12B(4660); PFKFB2(5208); CR1(1378); |
| | 1127; 1128; 1129; | KCNK2(3776); C1orf121(51029); RPL22(6146); HES2(54626); |
| | | FUSIP1(10772); KIAA0319L(79932); PDE4DIP(9659); KCNJ10 |
| | | (3766); BRP44(25874); ANKRD45(339416); GLT25D2(23127); |
| | | KIF21B(23046); TNNI1(7135); SYT2(127833); ENAH(55740); |
| | | SOX11(6664); KLF11(8462); SELI(85465); DPYSL5(56896); |
| | | UBXD2(23190); KLHL23(151230); HOXD10(3236); CREB1(1385); |
| | | C2orf21(285175); HRB(3267); RNSEH1(246243); ADAM17(6868); |
| | | AFF3(3899); ORC4L(5000); RAPH1(65059); TMBIM1(64114); |
| | | CRTAP(10491); LIMD1(8994); SLMAP(7871); PVRL3(25945); |
| | | DIRC2(84925); NUDT16(131870); SH3BP5(9467); TMEM110 |
| | | (375346); ADAMTS9(56999); VGLL3(389136); MAK3(80218); |
| | | EIF5A2(56648); MASP1(5648); WHSC1(7468); LOC285429 |
| | | (285429); SPATA18(132671); SLC4A4(8671); STOX2(56977); |
| | | LETM1(3954); FLJ46481(389197); DKFZp761B107(91050); |
| | | PHOX2B(8929); ATP8A1(10396); UBE2D3(7323); DKK2(27123); |
| | | PRSS12(8492); SETD7(80854); OTUD4(54726); C4orf18(51313); |
| | | LOC493869(493869); MAP1B(4131); HMGCR(3156); DCP2 |
| | | (167227); SMAD5(4090); PCDHB12(56124); MYOZ3(91977); |
| | | G3BP(10146); SEMA5A(9037); ANKH(56172); MOCS2(4338); |
| | | PJA2(9867); IBRDC2(255488); ZNF192(7745); RUNX2(860); |
| | | COL19A1(1310); RP5-875H10.1(389432); C6orf71(389434); |
| | | TULP4(56995); WTAP(9589); QKI(9444); TRIM10(10107); |
| | | MDGA1(266727); HMGCLL1(54511); UBE2J1(51465); CD164 |
| | | (8763); MOXD1(26002); HBS1L(10767); RALA(5898); EGFR |
| | | (1956); ADAM22(53616); TRRAP(8295); RBM33(155435); |
| | | ZNF12(7559); SP8(221833); HOXA5(3202); FLJ10803(55744); |
| | | PURB(5814); CALN1(83698); CDK6(1021); FLJ13576(64418); |
| | | PODXL(5420); CNOT4(4850); ENY2(56943); ZFP41(286128); |
| | | ZNF395(55893); MYST3(7994); PAG1(55824); TP531NP1(94241); |
| | | AZIN1(51582); RSPO2(340419); NR4A3(8013); R |

TABLE 4-84

| | | |
|---|---|---|
| | | ABGAP1(23637); CDK9(1025); DNM1(1759); GPR107(57720); |
| | | GABBR2(9568); C9orf80(58493); ARL5B(221079); PAPSS2 |
| | | (9060); IFIT5(24138); ENTPD7(57089); C10orf26(54838); |
| | | NEURL(9148); PRKCQ(5588); C10orf67(256815); C10orf72 |
| | | (196740); ASCC1(51008); KCNMA1(3778); PPP1R3C(5507); |
| | | IPO7(10527); AMPD3(272); NAV2(89797); API5(8539); |
| | | FKSG44(83786); NPAS4(266743); PANX1(24145); CBL(867); |
| | | SC5DL(6309); SPTY2D1(144108); CD59(966); ARRB1(408); |
| | | MDS025(60492); FZD4(8322); GPR83(10888); PPP2R1B(5519); |
| | | PRH2(5555); TMEM117(84216); DYRK2(8445); CPSF6(11052); |
| | | TMEM132B(114795); RAD52(5893); CDCA3(83461); DUSP16 |
| | | (80824); BCAT1(586); MGC24039(160518); CPNE8(144402); |
| | | SLC2A13(114134); LOC401720(401720); KIAA0286(23306); |
| | | LIN7A(8825); DCN(1634); BTG1(694); IKIP(121457); PRDM4 |
| | | (11108); THRAP2(28389); C12orf49(79794); CIT(11113); |
| | | SPPL3(121665); GPR81(27198); MGC9850(219404); HS6ST3 |
| | | (266722); BIVM(54841); TRIM9(114088); EXOC5(10640); |
| | | KLF13(51621); TMEM62(80021); SORD(6652); RNF111(54778); |
| | | FEM1B(10116); DNAJA4(55466); LOC440295(440295); ASB7 |
| | | (140460); MYO5A(4644); CCPG1(9236); PRTG(283659); |
| | | CSNK1G1(53944); UBE2I(7329); ALG1(56052); C16orf45 |
| | | (89927); NFATC2IP(84901); NOL3(8996); HAS3(3038); |
| | | HSBP1(3281); SPG7(6687); ZNF434(54925); XYLT1(64131); |
| | | LOC440350(440350); CMTM4(146223); HSDL1(83693); ZCCHC14 |
| | | (23174); CHRNB1(1140); WSB1(26118); TNFAIP1(7126); |
| | | ZNF207(7756); MSI2(124540); KCTD2(23510); HCP1(113235); |
| | | DDX52(11056); PLCD3(113026); ARHGAP27(201176); ANKRD40 |
| | | (91369); H3F3B(3021); MAFG(4097); ANKRD12(23253); MIB1 |
| | | (57534); RIOK3(8780); DTNA(1837); C18orf25(147339); |
| | | SMAD4(4089); MBD2(8932); FVT1(2531); ZADH2(284273); |
| | | MBP(4155); RPL28(6158); DIRAS1(148252); ZNF585A(199704); |
| | | FLJ36888(126526); ATPBD3(90353); STK35(140901); CDS2 |
| | | (8760); LOC128439(128439); RAE1(8480); ACSS1(84532); |
| | | NCOA6(23054); GDF5(8200); JAM2(58494); TTC3(7267); |
| | | PDXK(8566); ADAMTS5(11096); FBLN1(2192); BID(637); CBX7 |
| | | (23492); ZNF81(347344); YIPF6(286451); RP11-647M7.1 |
| | | (55086); AGTR2(186); SPRY3(10251); SH3KBP1(30011); PCYT1B |
| | | (9468); RP11-217H1.1(84061); ACSL4(2182); CD99L2(83692); |
| | | GABRE(2564); DDX3Y(8653); |
| hsa-miR-296 | 108; 3480; 3481; 3482; | LDLRAP1(26119); C1orf113(79729); ZBTB7B(51043); FDPS |
| | | (2224); IGSF4B(57863); PLEKHG5(57449); MTHFR(4524); ECE1 |
| | | (1889); TNNI1(7135); JMJD4(65094); SOX11(6664); SNX17 |
| | | (9784); BOK(666); TNS1(7145); PLXNA1(5361); PCBP4(57060); |
| | | MUC4(4585); SH3BP2(6452); MXD4(10608); KIAA1909(153478); |
| | | UNC5A(90249); N4BP3(23138); RNF44(22838); HK3(3101); DBN1 |
| | | (1627); HMGA1(3159); SRF(6722); TEAD3(7005); ADCY1(107); |
| | | LOC90639(9063 |

TABLE 4-85

| | | |
|---|---|---|
| | | 9); LRCH4(4034); PERQ1(64599); EPHA1(2041); LYNX1(66004); |
| | | PYCRL(65263); C9orf47(286223); FGD3(89846); DAB2IP |
| | | (153090); RALGPS1(9649); AK1(203); CARD9(64170); FAM53B |
| | | (9679); SLCO2B1(11309); SLC25A22(79751); FOSL1(8061); |
| | | KIAA1853(84530); IPF1(3651); JDP2(122953); OTUB2(78990); |
| | | TRAF3(7187); PACS2(23241); RGMA(56963); CACNA1H(8912); |
| | | PDPK1(5170); ARMC5(79798); LOC197322(197322); RPL13 |
| | | (6137); CCDC78(124093); N-PAC(84656); PCOLN3(5119); |
| | | TUSC5(286753); TNFSF12(8742); STARD3(10948); RARA(5914); |
| | | TMEM104(54868); KIAA0195(9772); BAIAP2(10458); SCARF1 |
| | | (8578); GAS7(8522); MGC23280(147015); CUEDC1(404093); |
| | | TBC1D16(125058); SECTM1(6398); APC2(10297); NFIC(4782); |
| | | DIRAS1(148252); ZBTB7A(51341); SEMA6B(10501); RANBP3 |
| | | (8498); CACNA1A(773); SNPH(9751); RTEL1(51750); ZGPAT |
| | | (84619); DNAJC5(80331); TRPC4AP(26133); GM632(57473); |
| | | PDXK(8566); TRPM2(7226); DGCR6(8214); P2RXL1(9127); |
| | | GAS2L1(10634); SYNGR1(9145); PPM1F(9647); CBX6(23466); |
| | | POLR3H(171568); WNT7B(7477); LOC440836(440836); PCTK1 |
| | | (5127); AVPR2(554); |
| hsa-miR-302b* | 109; 1130; 3483; 1131; | CLIC4(25932); ZYG11B(79699); ANGPTL3(27329); ATG4C |
| | 1521; | (84938); LEPROT(54741); LRRC8C(84230); RAP1A(5906); |
| | | RBM8A(9939); SNX27(81609); RALGPS2(55103); NEK7 |
| | | (140609); DTL(51514); CNL2(81669); KLHL21(9903); |
| | | PRAMEF8(391002); RBMXL1(494115); RSBN1(54665); CTSS |
| | | (1520); SH2D1B(117157); RIPK5(25778); NUCK81(64710); |
| | | EGLN1(54583); ZNF670(93474); LYCAT(253558); SLC30A6 |
| | | (55676); MAP4K4(9448); GALNT13(114805); GULP1(51454); |
| | | C2orf21(285175); FLJ16008(339761); SDPR(8436); ERBB4 |
| | | (2066); CUL3(8452); RPP14(11102); IGSF4D(253559); RAP2B |
| | | (5912); SKIL(6498); B3GNT5(84002); TP73L(8626); OSBPL10 |
| | | (114884); LZTFL1(54585); PB1(55193); PRICKLE2(166336); |
| | | TMF1(7110); IFT57(55081); WIG1(64393); WHSC1(7468); |
| | | LOC285429(285429); SLC4A4(8671); NPNT(255743); ANK2(287); |
| | | RAB33B(83452); ATP8A1(10396); GABRG1(2565); GABRA4(2557); |
| | | PRKG2(5593); SLC7A11(23657); SLC1A3(6507); LOC285636 |
| | | (285636); DCP2(167227); DMXL1(1667); G3BP(10146); SGCD |
| | | (6444); RPL37(6167); LHFPL2(10184); AFF4(27125); EBF(1879); |
| | | LMAN2(10960); LOC51149(51149); AIG1(51390); PHACTR2(9749); |
| | | STXBP5(134957); RP5-875H10.1(389432); C6orf71(389434); |
| | | MAP3K7(6885); TSPYL1(7259); PIP3-E(26034); GLCCI1(113263); |
| | | HDAC9(9734); MGC33530(222008); VKORC1L1(154807); CLDN12 |
| | | (9069); ASB4(51666); CDCA7L(55536); PURB(5814); CDK6(1021); |
| | | CREB3L2(64764); UBE2V2(7336); PPM2C(54704); DPY19L4(286148); |
| | | PSD3(23362); PAG1(55824); TMEM64(169200); KCNV1(27012); SNTB1 |
| | | (6641); GDA(9615); C9orf47(286223); PALM2(114299); MOBKL2B |
| | | (79817); T |

TABLE 4-86

| | | |
|---|---|---|
| | | MEM2(23670); EPB41L4B(54566); RP11-162I21.1(340843); |
| | | HECTD2(143279); C10orf6(55719); MTG1(92170); SAR1A |
| | | (56681); AP3M1(26985); TLL2(7093); KIAA1914(84632); |
| | | EIF3S10(8661); CEP57(9702); ZNF202(7753); FKBP4(2288); |
| | | CPSF6(11052); KCNMB4(27345); CHST11(50515); OAS2(4939); |
| | | TMED2(10959); SP7(121340); CBX5(23468); NOS1(4842); |
| | | C13orfl2(51371); C13orf8(283489); ABCC4(10257); SLC10A2 |
| | | (6555); KIAA1333(55632); MIPOL1(145282); PSMC6(5706); |
| | | PPM1A(5494); NRXN3(9369); KIAA0831(22863); FLJ39779 |
| | | (400223); SCAND2(54581); MESDC2(23184); N4BP1(9683); |
| | | AP1G1(164); DKFZp667M2411(147172); GAS7(8522); PLXDC1 |
| | | (57125); CEP192(55125); SMAD4(4089); SERINC3(10955); |
| | | NFATC2(4773); ABCC13(150000); BRWD1(54014); CXorf39 |
| | | (139231); NRK(203447); PHF6(84295); SLC9A6(10479); |
| | | TAB3(257397); CXorf38(159013); WNK3(65267); LAMP2(3920); |
| | | ODZ1(10178); |
| hsa-miR-302c* | 110; 1132; | SH3GLB1(51100); FAM102B(284611); VANGL1(81839); RBM8A |
| | | (9939); RASAL2(9462); PFKFB2(5208); LIN9(286826); HNRPU |
| | | (3192); HK2(3099); LOC339745(339745); ADAM23(8745); ING5 |
| | | (84289); CACNB4(785); ERBB4(2066); EDEM1(9695); IGSF4D |
| | | (253559); TP73L(8626); MAGI1(9223); CGGBP1(8545); EIF5A2 |
| | | (56648); FGF12(2257); TMEM33(55161); CEP135(9662); ELMOD2 |
| | | (255520); EDNRA(1909); TRIM2(23321); PAQR3(152559); KLHL8 |
| | | (57563); SLC7A11(23657); TNPO1(3842); DCP2(167227); MATR3 |
| | | (9782); SEMA5A(9037); LIFR(3977); LYSMD3(116068); ST8SIA4 |
| | | (7903); ZNF300(91975); PTP4A1(7803); COL19A1(1310); |
| | | C6orf162(57150); RP5-875H10.1(389432); PKHD1(5314); SYNCRIP |
| | | (10492); TSPYL1(7259); ZNRF2(223082); CLDN12(9069); MDFIC |
| | | (29969); MKLN1(4289); ETV1(2115); BAG4(9530); HNF4G(3174); |
| | | SLC30A8(169026); WHSC1L1(54904); DMRT3(58524); TGFBR1(7046); |
| | | PALM2(114299); AK3(50808); CER1(9350); PSIP1(11168); ARL5B |
| | | (221079); TCF8(6935); CUL5(8065); SESN3(143686); ATP6V0A2 |
| | | (23545); SLC38A4(55089); FBXO21(23014); RFP2(10206); RNF6 |
| | | (6049); DACH1(1602); ARF6(382); PPM1A(5494); COQ6(51004); |
| | | SLC25A21(89874); EXOC5(10640); EIF3S1(8669); NDNL2(56160); |
| | | PRTG(283659); PHKB(5257); NFAT5(10725); THUMPD1(55623); |
| | | CIAPIN1(57019); KCNJ2(3759); RNMT(8731); B4GALT6(9331); |
| | | CEBPG(1054); ZNF264(9422); DKFZp686I1569(400720); PLCB1 |
| | | (23236); RP5-1022P6.2(56261); CHD6(84181); DIDO1(11083); |
| | | SON(6651); SLC5A3(6526); BRWD1(54014); ZNF295(49854); PPARA |
| | | (5465); MAPK1(5594); XG(7499); ZIC3(7547); LOC203547(203547); |
| | | RPS6KA3(6197); AMMECR1(9949); |
| hsa-miR-362 | 111; 3484; 3485; | S100PBP(64766); UHMK1(127933); DDR2(4921); NAV1(89796); |
| | | IPO9(55705); PRELP(5549); ATP2B4(493); C1orf107(27042); |
| | | TGFB2(7042); SYNC1(81493); TRIM62(55223); CSMD2(114784); |
| | | MTF |

TABLE 4-87

| | | |
|---|---|---|
| | | 1(4520); PIK3C2B(5287); GREM2(64388); AKT3(10000); |
| | | FLJ40869(348654); ANKRD36(375248); IL1F5(26525); |
| | | MAP1D(254042); FLJ44048(401024); C2orf17(79137); |
| | | TEX261(113419); C2orf3(6936); KLHL18(23276); FYCO1 |
| | | (79443); NPHP3(27031); KLHL6(89857); HIP2(3093); |
| | | USP38(84640); FLJ81951(153830); C6orf153(88745); |
| | | PPP1R14C(81706); DJ122O8.2(57226); RBAK(57786); |
| | | UBE2D4(51619); MGC42090(256130); STEAP4(79689); |
| | | FLJ36031(168455); FAM86B1(85002); NKX3-1(4824); |
| | | C9orf47(286223); FBXW2(26190); MRC1L1(414308); |
| | | TMEM20(159371); CASC2(255082); C10orf72(196740); |
| | | C1Oorf56(219654); SORBS1(10580); FAM26C(255022); |
| | | KIAA1754(85450); EIF3S10(8661); SPTY2D1(144108); |
| | | FBXO3(26273); CTSC(1075); CACNA1C(775); FLJ20489 |
| | | (55652); DAZAP2(9802); JARID1A(5927); FLJ40296 |
| | | (122183); SAMD4A(23034); SLC39A9(55334); SPTLC2 |
| | | (9517); ARNT2(9915); LSM16(80153); UBN1(29855); |
| | | AFG3L1(172); GRIN2A(2903); GARNL4(23108); TNFSF12 |
| | | (8742); SARM1(23098); RAB11FIP4(84440); SUZ12(23512); |
| | | CROP(51747); LLGL2(3993); ANKRD40(91369); TRIM25 |
| | | (7706); FAM104A(84923); ST8SIA3(51046); APOE(348); |
| | | KLK2(3817); ZNF701(55762); ZNF415(55786); RIMS4 |
| | | (140730); TP53RK(112858); HUNK(30811); RP5- |
| | | 1104E15.5(54471); ZC3H7B(23264); PPARA(5465); |
| | | SF3A1(10291); ATP7A(538); ACE2(59272); CXorf38 |
| | | (159013); MOSPD1(56180); DAZ2(57055); |
| hsa-miR-373* | 112; 1522; 1523; | H6PD(9563); RBBP4(5928); PRKACB(5567); ZNF326(284695); |
| | | TMEM56(148534); UHMK1(127933); DDR2(4921); MPZL1 |
| | | (9019); RALGPS2(55103); FAM20B(9917); NR5A2(2494); |
| | | FBXO28(23219); C1orf69(200205); DISC1(27185); |
| | | KIAA0090(23065); E2F2(1870); ZBTB8OS(339487); CLSPN |
| | | (63967); SERBP1(26135); SLC30A1(7779); ENAH(55740); |
| | | C1orf96(126731); GNG4(2786); PQLC3(130814); PLEKHH2 |
| | | (130271); HTLF(3344); C2orf13(200558); MRPL19(9801); |
| | | MGC5509(79074); DUSP19(142679); FLJ338973(205327); |
| | | CREB1(1385); RPE(6120); SERTAD2(9792); AFF3(3899); |
| | | ST6GAL2(84620); SESTD1(91404); ATXN7(6814); COL8A1 |
| | | (1295); DTX3L(151636); UBE1DC1(79876); PIK3CA(5290); |
| | | SENP5(205564); XPC(7508); MAP4(4134); CAST1(26059); |
| | | VGLL3(389136); WDR5B(54554); KPNA4(3840); EIF5A2 |
| | | (56648); MCF2L2(23101); PCDH7(5099); TMEM33(55161); |
| | | LOC401137(401137); MTHFD2L(441024); SYNPO2(171024); |
| | | ARFIP1(27236); C4orf15(79441); FLJ38991(285521); |
| | | SCD5(79966); SH3D19(152503); SCAMP1(9522); CAMK4 |
| | | (814); DCP2(167227); LOC133619(133619); KIAA0141 |
| | | (9812); SGCD(6444); ARSB(411); MTX3(345778); ST8SIA4 |
| | | (7903); ADAMTS2(9509); IRF4(3662); HIST1H3E(8353); |
| | | BRD2(6046); POLR1C(9533); ANKRD6(22881); TBPL1(9519); |
| | | TULP4(56995); RP11-145H9.1(340156); SERPINB9(5272); |
| | | TRAM2(9697); CDC2L6(23097); STX7( |

TABLE 4-88

| | | |
|---|---|---|
| | | 8417); LATS1(9113); PIP3-E(26034); PDCD2(5134); FOXK1 |
| | | (221937); PHTF2(57157); CLDN12(9069); ZKSCAN1(7586); |
| | | AKR1D1(6718); TMED4(222068); PURB(5814); CDK6(1021); |
| | | CLEC5A(23601); LEPROTL1(23484); MTDH(92140); SLC30A8 |
| | | (169026); PHF20L1(51105); CCDC25(55246); WHSC1L1(54904); |
| | | IMPAD1(54928); VCPIP1(80124); C9orf47(286223); PAPPA |
| | | (5069); OLFML2A(169611); PSIP1(11168); KLHL9(55958); |
| | | ZBTB26(57684); CUGBP2(10659); ZNF33A(7581); ZNF22(7570); |
| | | ARID5B(84159); REEP3(221035); EIF4EBP2(1979); KIAA1128 |
| | | (54462); RPP30(10556); CCNJ(54619); SCD(6319); PAPD1 |
| | | (55149); C10orf72(196740); MRPS16(51021); COX15(1355); |
| | | C10orf46(143384); RPL27A(6157); IRRC51(220074); PANX1 |
| | | (24145); CBL(867); SLC1A2(6506); ZBTB3(79842); HBXAP |
| | | (51773); GRM5(2915); C12orf32(83695); ATF7IP(55729); |
| | | FGD4(121512); RBMS2(5939); SLC16A7(9194); KCNMB4(27345); |
| | | KIAA0152(9761); RAD52(5893); TMTC1(83857); ZNF641(121274); |
| | | CBX5(23468); GNS(2799); PHLDA1(22822); EEA1(8411); SBNO1 |
| | | (55206); GOLGA3(2802); RFP2(10206); KCTD12(115207); DZIP1 |
| | | (22873); BCL2L2(599); ARHGAP5(394); C14orf111(51077); |
| | | FLRT2(23768); EXOC5(10640); EIF3S1(8669); Gcom1(145781); |
| | | RAB11A(8766); RCCD1(91433); TP53BP1(7158); PRTG(283659); |
| | | AP3S2(10239); C15orf38(348110); LINS1(55180); SPN(6693); |
| | | HAS3(3038); FLJ32130(146540); RANBP10(57610); EXOSC6 |
| | | (118460); ADAMTS18(170692); PAFAH1B1(5048); G6PC(2538); |
| | | PRKCA(5578); GAS7(8522); FAM106A(80039); NUFIP2(57532); |
| | | LOC162427(162427); DUSP3(1845); SPAG9(9043); FAM104A |
| | | (84923); SUMO2(6613); ACOX1(51); VAPA(9218); HRH4(59340); |
| | | SMAD4(4089); COLEC12(81035); SYT4(6860); SMAD2(4087); |
| | | MBD2(8932); ZADH2(284273); UBA52(7311); APOE(348); |
| | | LOC390980(390980); ZNF587(84914); ZNF490(57474); ZNF100 |
| | | (163227); KIAA1559(57677); MGC35402(399669); ZNF702 |
| | | (79986); KIAA1219(57148); SLC2A10(81031); C20orf177 |
| | | (63939); RBL1(5933); ABCC13(150000); D21S2056E(8568); |
| | | NF2(4771); APOL6(80830); APOBEC3F(200316); ZNF70(7621); |
| | | PDHA1(5160); EIF2S3(1968); USP9X(8239); ZC3H12B(340554); |
| | | dJ341D10.1(286453); ATP1B4(23439); BIRC4(331); TRAPPC2 |
| | | (6399); KLHL15(80311); SMC1L1(8243); WNK3(65267); OPHN1 |
| | | (4983); RNF12(51132); TAF9B(51616); LAMP2(3920); |
| hsa-miR-374 | 113; 1133; 1134; 1135; | KIF1B(23095); GBP6(163351); LRRC8C(84230); ABCD3(5825); |
| | 1136; 3486; 1137; 1138; | AGL(178); CDC14A(8556); UHMK1(127933); RGS4(5999); |
| | 1524; | PAPPA2(60676); YOD1(55432); NCOA1(8648); FLJ13910(64795); |
| | | HNMT(3176); LOC339745(339745); ITGA4(3676); TRPM8(79054); |
| | | MGAT4A(11320); PGAP1(80055); C3orf23(285343); IGSF4D |
| | | (253559); ZPLD1(131368); NCK1(4690); VGLL3(389136); DBR1 |
| | | (51163); DHX36(170506); FGF5(2250); AFF1(4299); PDLIM5 |
| | | (10611); DAPP1(27 |

TABLE 4-89

| | | |
|---|---|---|
| | | 071); PPAT(5471); TMPRSS11B(132724); RASSF6(166824); |
| | | CXCL5(6374); PAQR3(152559); DNAJB14(79982); SLC7A11 |
| | | (23657); FLJ38482(201931); ASB5(140458); IL7R(3575); |
| | | ITGA2(3673); TNPO1(3842); POLK(51426); FLJ37562 |
| | | (134553); LIFR(3977); FLJ21657(64417); ELOVL7(79993); |
| | | HOMER1(9456); LOC153364(153364); ACSL6(23305); C6orf68 |
| | | (116150); DCDC2(51473); ICK(22858); ASCC3(10973); AHI1 |
| | | (54806); TXLNB(167838); PDE10A(10846); CREB5(9586); |
| | | LOC441257(441257); STEAP2(261729); WNT16(51384); CALD1 |
| | | (800); MGC42090(256130); STEAP4(79689); NDUFA5(4698); |
| | | YTHDF3(253943); PLAG1(5324); PMP2(5375); ANGPT1(284); |
| | | TRPS1(7227); NTRK2(4915); PAPPA(5069); RFX3(5991); |
| | | KLHL9(55958); TRPM6(140803); FRMD3(257019); C9orf5 |
| | | (23731); IFIT5(24138); ADD3(120); RP11-142I17.1(26095); |
| | | PLEKHK1(219790); ADAM12(8038); PANX1(24145); PGM2L1 |
| | | (283209); HBXAP(51773); SESN3(143686); KIAA0999(23387); |
| | | STK38L(23012); MON2(23041); TMEM132B(114795); KRAS |
| | | (3845); SLC41A2(84102); MGC40069(348035); KIAA1333 |
| | | (55632); MIPOL1(145282); PCNX(22990); C14orf138(79609); |
| | | SEL1L(6400); PLDN(26258); Gcom1(145781); LOC440295 |
| | | (440295); UBE3A(7337); NF1(4763); MSI2(124540); |
| | | C18orf1(753); DOK6(220164); SMAD2(4087); NETO1(81832); |
| | | ZNF568(374900); BMP2(650); RAB22A(57403); BTBD4(140685); |
| | | PKNOX1(5316); SCML1(6322); KAL1(3730); DMD(1756); |
| hsa-miR-376a | 114; 3487; 1139; 1140; | PRKACB(5567); CDC14A(8556); KIAA1804(84451); HSPB7 |
| | 1141; 1142; 1525; | (27129); C1orf135(79000); RHBDL2(54933); KIAA0494 |
| | | (9813); TMEM48(55706); G6PC2(57818); COQ10B(80219); |
| | | PLCL1(5334); BMPR2(659); CREB1(1385); TGFA(7039); |
| | | TGFBRAP1(9392); WDR33(55339); CERKL(375298); PGAP1 |
| | | (80055); TRNT1(51095); GALNTL2(117248); CCR2(1231); |
| | | CD200(4345); NEK11(79858); RAP2B(5912); PAK2(5062); |
| | | ANKRD28(23243); THRB(7068); GORASP1(64689); DCP1A |
| | | (55802); ZNF80(7634); LIPH(200879); SLC34A2(10568); |
| | | PHF17(79960); GAB1(2549); TIFA(92610); FLJ23191 |
| | | (79625); SLC7All(23657); SGCD(6444); SEMA5A(9037); |
| | | PRLR(5618); HCN1(348980); ELOVL7(79993); P18SRP |
| | | (285672); TICAM2(353376); HNRPA0(10949); QKI(9444); |
| | | CDC2L6(23097); LPAL2(80350); HDAC9(9734); WBSCR19 |
| | | (285955); LOC441257(441257); MGC57359(441272); |
| | | PAPOLB(56903); SNX13(23161); SLC7A2(6542); SULF1 |
| | | (23213); PI15(51050); POP1(10940); KCNS2(3788); |
| | | PLAG1(5324); EIF2C2(27161); INA(9118); ACSL5(51703); |
| | | C10orf111(221060); TRIM22(10346); LUZP2(338645); |
| | | TMEM16C(63982); ZFP91(80829); FCHSD2(9873); RAB30 |
| | | (27314); MTMR2(8898); HMGA2(8091); NAV3(89795); |
| | | CUTL2(23316); FBXW8(26259); TMEM132B(114795); |
| | | PARP11(57097); GPC6(10082); STYX(6815); WDR22(8816); |
| | | FBXO22(26263); IL16(3603); SCAND2(54581); NIP7 |
| | | (51388); GRIN2A(29 |

TABLE 4-90

03); BOLA2(552900); MAP2K6(5608); NLE1(54475); TBC1D3C
(414060); HELZ(9931); MALT1(10892); DSC3(1825); BRUNOL4
(56853); MBP(4155); ZNF439(90594); MGC26694(284439);
ZNF254(9534); ZNF230(7773); ZBTB7A(51341); MGC71805
(403113); ZNF180(7733); RAB22A(67403); GGTL3(2686);
PTPRT(11122); TRPM2(7226); C21orf66(94104); BRWD1
(54014); LOC400924(400924); RAB9B(51209); RP13-383K5.1
(55285); LAMP2(3920); DAZ2(57055);

| | | |
|---|---|---|
| hsa-miR-378 | 115; 3488; 3489; | CACNA1E(777); HES2(54626); DFFA(1676); ENSA(2029); RPI- |
| | | 14N1.3(388698); ISG20L2(81875); RIPK5(25778); ENAH(55740); |
| | | GPR155(151556); ZNF620(253639); MGC40579(256356); LETM1 |
| | | (3954); LRPAP1(4043); ASAHL(27163); LSM11(134353); IRF1 |
| | | (3659); DNAJC18(202052); KIAA1919(91749); NUDT3(11165); |
| | | GATAD1(57798); ZKSCAN1(7586); SNX8(29886); HIP1(3092); |
| | | CTSB(1508); RAB11FIP1(80223); WDR21C(138009); 0STF1(26578); |
| | | C9orf47(286223); LDB3(11155); ITIH5(80760); TUB(7275); |
| | | CCDC15(80071); IGF2(3481); SPTBN2(6712); CCND2(894); |
| | | ETV6(2120); C14orf111(51077); IVD(3712); C15orf38(348110); |
| | | SPN(6693); C16orf28(65259); RHBDL3(162494); SMYD4(114826); |
| | | SLC25A35(399512); GAS7(8522); TOM1L2(146691); GJA7(10052); |
| | | TNFAIP8L1(126282); GATAD2A(54815); 2NF431(170959); FLJ45684 |
| | | (400666); HM13(81502); CHRNA4(1137); PPARA(5465); |

| | | |
|---|---|---|
| hsa-miR-409-3p | 116; | Clorf130(400746); PTPRF(5792); C1orf171(127253); GIPC2 |
| | | (54810); VANGL1(81839); SEC22L1(9554); S100A7L1(338324); |
| | | PRRX1(5396); CAMSAP1L1(23271); IPO9(55705); YRDC(79693); |
| | | TMED5(50999); C1orf183(65924); NOTCH2(4853); PIGM(93183); |
| | | C1orf110(339512); ZBTB41(360023); SLC41A1(254428); CHML |
| | | (1122); HNRPU(3192); TAF1B(9014); XAB1(11321); ANXA4(307); |
| | | KCN1P3(30818); MGC5509(79074); ACTR3(10096); PPIG(9360); |
| | | MAP2(4133); SEPT2(4735); PDIA6(10130); PIGF(5281); AFF3 |
| | | (3899); ST6GAL2(84620); ORC4L(5000); WASPIP(7456); ATF2 |
| | | (1386); K1AA1715(80856); GDF8(2660); ERBB4(2066); NKTR |
| | | (4820); PXK(54899); SLC15A2(6565); SLC25A36(55186); RAP2B |
| | | (5912); GMPS(8833); SATB1(6304); THRB(7068); ZNF445 |
| | | (353274); PB1(55193); EIF4E3(317649); CD47(961); PTPLB |
| | | (201562); TNIK(23043); DKFZP564O0823(25849); C4orf12 |
| | | (404201); GRIA2(2891); FLJ31659(152756); ZNF721(170960); |
| | | CCDC4(389206); PGRMC2(10424); LOC201725(201725); |
| | | FLJ38482(201931); FLJ11193(55322); HMGCR(3156); RNUXA |
| | | (51808); KCTD16(57528); SGCD(6444); LIFR(3977); HMGCS1 |
| | | (3157); PDE4D(5144); FEM1C(56929); SH3PXD2B(285590); |
| | | LIN28B(389421); SART2(29940); EYA4(2070); UST(10090); |
| | | C6orf71(389434); SLC22A3(6581); QKI(9444); TMEM30A(55754); |
| | | ELOVL4(6785); UBE2J1(51465); PIP3-E(26034); C1GALT1 |
| | | (56913); HDAC9(9734); CREB5(9586); INMT(11185); EGFR |
| | | (1956); ADAM22(6 |

TABLE 4-91

| | | |
|---|---|---|
| | | 3616); ARHGEF5(7984); PMS2(5395); CDCA7L(55536); SRI |
| | | (6717); CDK6(1021); GATS(352954); TSGA14(95681); |
| | | ZC3HAV1(56829); SLC37A3(84255); TNKS(8658); ZNF705CP |
| | | (389631); LEPROTL1(23484); PI15(51050); CRISPLD1 |
| | | (83690); C8orf1(734); SLC30A8(169026); FAM83A(84985); |
| | | STC1(6781); BRF2(55290); FLJ43582(389649); CALB1(793); |
| | | TPD52L3(89882); ASAH3L(340485); C9orf47(286223); |
| | | TGFBR1(7046); PALM2(114299); NEK6(10783); KIAA0367 |
| | | (23273); OGN(4969); PHF19(26147); TRAF1(7185); ZNF365 |
| | | (22891); CXXC6(80312); DDX21(9188); MARCH5(54708); |
| | | ITIH5(80760); MBL2(4153); KCNMA1(3778); SH3PXD2A(9644); |
| | | C10orf46(143384); GPIAP1(4076); CTNND1(1500); TRAF6 |
| | | (7189); MRE11A(4361); KBTBD3(143879); CREBL2(1389); |
| | | FLJ22028(79912); STK38L(23012); KLHDC5(57542); CPSF6 |
| | | (11052); THAP2(83591); TBC1D15(64786); KIAA1853(84530); |
| | | ATP6V0A2(23545); 2NF84(7637); OACT5(10162); CLEC4E |
| | | (26253); STYK1(55359); BCAT1(586); DPY19L2(283417); |
| | | PCTK2(5128); CKAP2(26586); PCDH17(27253); KATNAL1 |
| | | (84056); PCDH9(5101); MPP5(64398); FLJ11806(79882); |
| | | OTUB2(78990); SYNJ2BP(55333); GTF2A1(2957); THBS1 |
| | | (7057); TMOD2(29767); SNX1(6642); PTPLAD1(51495); |
| | | NIPA1(123606); SUHW4(54816); CSNK1G1(53944); CHSY1 |
| | | (22856); ALG1(56052); SLC6A2(6530); CYB5B(80777); |
| | | NFAT5(10725); GRIN2A(2903); LOC440350(440350); BOLA2 |
| | | (552900); AP1G1(164); BIRC4BP(54739); KCNJ16(3773); |
| | | GAS7(8522); BRCA1(672); CDC27(996); GNA13(10672); |
| | | ABCA10(10349); CEP192(55125); ANKRD30B(374860); |
| | | CABLES1(91768); C18orf54(162681); DOK6(220164); |
| | | SMAD2(4087); BCL2(596); C18orf4(92126); ENF490(57474); |
| | | ZFP260(339324); HLK13(26085); PRND(23627); C1QTNF6 |
| | | (114904); SH3BGRL(6451); DIAPH2(1730); AFF2(2334); |
| | | RP11-130N24.1(340533); CHM(1121); CXorf34(79979); |
| | | MCART6(401612); RP13-383K5.1(55285); TSPY1(7258); |
| | | DAZ2(57055); |
| hsa-miR-409-5p | 117; 1143; 1144; 1145; | PRKAA2(5563); YOD1(55432); PLEKBH2(130271); USP53 |
| | | (54532); PPARGC1A(10891); G3BP(10146); NRF1(4899); |
| | | ZNF12(7559); DRCTNNB1A(84668); TGFBR1(7046); NUP98 |
| | | (4928); JDP2(122953); MYEF2(50804); MKL2(57496); |
| | | RUNDC1(146923); ILF3(3609); DYRK1A(1859); PPARA |
| | | (5465); XK(7504); SEPT6(23157); ACAT1(38); ACVR1B |
| | | (91); ACVR2A(92); ADAM10(102); ADCY9(115); ALAS2 |
| | | (212); APOF(319); APLP2(334); ARHGAP5(394); PHOX2A |
| | | (401); CAMK2G(818); CAST(831); CCND3(896); CCNT2 |
| | | (905); CD22(933); CD47(961); CD79A(973); CHD3(1107); |
| | | CHM(1121); CHRND(1144); CLK2(1196); CPD(1362); |
| | | CPT1A(1374); CSPG4(1464); CYP1B1(1545); DAB1(1600); |
| | | DBT(1629); DDB1(1642); DIO3(1735); EFNB1(1947); |
| | | EFNB2(1948); EIF4EBP2(1979); EPHA4(2043); FDXR(2232); |
| | | FGD1(2245); FGF5(2250); FOXE1(2304); FOSL2(2355); F |

TABLE 4-92

| | | |
|---|---|---|
| | | UT4(2526); GABRB2(2561); GABRG1(2565); GABRP(2568); |
| | | GALNT1(2589); GCDH(2639); GJB3(2707); GNAO1(2775); |
| | | GNG7(2788); GNGT1(2792); GPD1(2819); GPM6A(2823); |
| | | GPM6B(2824); GTF3C2(2976); HABP2(3026); HMGN2(3151); |
| | | HMGCR(3156); HYAL1(3373); IDS(3423); IFNAR2(3455); |
| | | IGF1R(3480); IL16(3603); INSM1(3642); INSR(3643); |
| | | ITGB1(3688); KCNK1(3775); KNS2(3831); KPNA1(3836); |
| | | KPNA2(3838); KRT12(3859); SMAD3(4088); MC2R(4158); |
| | | CXCL9(4283); MIP(4284); MAP3K10(4294); AFF1(4299); |
| | | MLLT6(4302); MOBP(4336); MYCL1(4610); MYH10(4628); |
| | | MYH11(4629); MYO5A(4644); |
| hsa-miR-429 | 118; 1146; 1147; 1148; | RBBP4(5928); LEPR(3953); FLJ12505(79805); CCNL2 |
| hsa-miR-200c | 1149; 1150; 1151; 1152; | (81669); ERRFI1(54206); FUBP1(8880); TRIM33(51592); |
| | 1153; 1154; 1155; 119; | ESRRG(2104); TAF5L(27097); ZC3H6(376940); HRB(3267); |
| | 3490; 1156; 1157; 1158; | MCFD2(90411); GFPT1(2673); ZFHX1B(9839); STAM2(10254); |
| | 1159; 1160; 1161; 1162; | WASPIP(7456); PPP4R2(151987); PIK3CA(5290); DCBLD2 |
| | 1163; 1164; 1165; 1166; | (131566); ELMOD2(265520); USP46(64854); FAM105B |
| | 1167; 1168; 1169; 1526; | (90268); SCAMP1(9522); LOX(4015); KIAA1244(57221); |
| | 1527; | QKI(9444); C6orf120(387263); TAP2(6891); DJ122O8.2 |
| | | (57226); ZNF655(79027); BCAP29(56973); MKLN1(4289); |
| | | INHBA(3624); SLC35B4(84912); HSPC049(29062); DLGAP2 |
| | | (9228); MTMR9(66036); ZDHHC2(51201); VPS13A(23230); |
| | | C9orf47(286223); STX17(55014); GPR107(57720); TCF8 |
| | | (6985); CCNJ(54619); TMEM26(219623); ARHGAP19(84986); |
| | | HIPK3(10114); SLC1A2(6506); CTSC(1075); PPP2R1B(5519); |
| | | NUDT4(11163); GAS2L3(283431); AVIL(10677); WASF3 |
| | | (10810); NARG1L(79612); ITR(160897); FLJ25477(219287); |
| | | TMEM46(387914); KATNAL1(84056); RP11-5G9.1(160857); |
| | | DZIP1(22873); NOVA1(4857); GMFB(2764); BCL11B(64919); |
| | | CASC4(113201); TMOD3(29766); SHC4(399694); PRTG(283659); |
| | | PRO0149(29035); USP31(57478); FTS(64400); RANBP10(57610); |
| | | BRCA1(672); C0X11(1353); ZNF302(55900); NCOA3(8202); |
| | | ABCC13(150000); SLC5A3(6526); C21orf91(54149); RP5- |
| | | 1104E15.5(54471); MSN(4478); OGT(8473); NLGN4X(57502); |
| | | RPS6KA3(6197); WNK3(65267); CHM(1121); |
| hsa-miR-432* | 120; | ZDHHC18(84243); KIAA0467(23334); HIAT1(64645); CSF1 |
| | | (1435); CTTNBP2NL(55917); ZNF687(57592); CHRNB2(1141); |
| | | RALGPS2(55103); LAMC2(3918); TMEM58(149345); CNTN2 |
| | | (6900); SRGAP2(23380); WNT3A(89780); E2F2(1870); BMP8B |
| | | (656); GCLM(2730); EXTL2(2135); SORT1(6272); PIK4CB |
| | | (5298); CLK2(1196); ARHGEF11(9826); SYT2(127833); |
| | | CCDC75(253635); IL1RL1(9173); NCK2(8440); HOXD10(3236); |
| | | SLC39A10(57181); ALS2CR19(117583); KIDINS220(57498); |
| | | RAB11FIP5(26056); TGOLN2(10618); IL1F8(27177); PAX8 |
| | | (7849); FLJ114816(84931); ERBB4(2066); NKTR(4820); |
| | | KLHL18(23276); MRAS(22808); ATP2B2(491); NUP210(23225); |
| | | LRRC2(79442); TMEM110(375346); RYBP(23429); WDR5B( |

TABLE 4-93

| | | |
|---|---|---|
| | | 54554); IGF2BP2(10644); MAN2B2(23324); FLJ46481(389197); |
| | | AFAP(60312); KLHL8(57563); GPM6A(2823); KIAA1909 |
| | | (153478); ARSK(153642); PCDHB9(56127); PCDHGA1(66114); |
| | | UBXD8(23197); SLC12A7(10723); C5orf20(140947); ANXA6 |
| | | (309); KCNMB1(3779); FLJ16171(441116); PRR3(80742); |
| | | PACSIN1(29993); OR11A1(26531); BACH2(60468); TSPYL4 |
| | | (23270); HBS1L(10767); FRMD1(79981); CREB5(9686); |
| | | ADCY1(107); LANCL2(55915); ELN(2006); PFTK1(5218); |
| | | OSBPL3(26031); LOC442535(442535); STEAP4(79689); |
| | | ZNF705CP(389631); XKR4(114786); PHF20L1(51105); |
| | | TNFRSF10B(8795); TP53INP1(94241); FBXL6(26233); |
| | | PIP5K1B(8395); C9orf47(286223); HSDL2(84263); |
| | | PTGDS(5730); PTCH(5727); AKNA(80709); EIF4EBP2 |
| | | (1979); CHST3(9469); PTPRE(5791); LRRC27(80313); |
| | | FRMD4A(55691); CRTAC1(55118); SYT9(143425); TUB |
| | | (7275); CCND1(595); SNF1LK2(23235); CBL(867); |
| | | FLJ45300(399957); COMMD9(29099); SHANK2(22941); |
| | | FCHSD2(9873); GAB2(9846); OPCML(4978); hCAP-D3 |
| | | (23310); FKBP4(2288); KIAA1467(57613); TEGT |
| | | (7009); AQP2(359); ANKRD33(341405); HOXC12(3228); |
| | | RBMS2(5939); LOC196463(196463); TMEM132B(114795); |
| | | PXN(5829); CAMKK2(10645); PITPNM2(57606); LOC440138 |
| | | (440138); ABHD4(63874); C14orf132(56967); SLC7A8 |
| | | (23428); KIAA0831(22863); ZFYVE26(23503); SEL1L |
| | | (6400); CHES1(1112); PML(5371); KIAA1920(114817); |
| | | NTRK3(4916); FLJ39743(283777); PCSK6(5046); RAB40C |
| | | (57799); CRAMP1L(57585); SYT17(51760); KIAA0556 |
| | | (23247); CHD9(80205); GPR97(222487); FLJ37464 |
| | | (283848); KIAA0513(9764); KIAA0182(23199); ZNF200 |
| | | (7752); USP31(57478); CDIPT(10423); LOC283849 |
| | | (283849); FLJ11171(55783); SLC7A5(8140); KIAA0523 |
| | | (23302); NLGN2(57555); SARM1(23098); ATP6V0A1(635); |
| | | NXPH3(11248); HLF(3131); YPEL2(388403); WDR68(10238); |
| | | PRKCA(5578); MPP2(4355); HDAC5(10014); MRPL10 |
| | | (124996); MAFG(4097); C18orfl(753); RNMT(8731); ACTN4 |
| | | (81); PLEKHG2(64857); DHX34(9704); POLR2E(5434); |
| | | TNPO2(30000); CHERP(10523); RASGRP4(115727); LOC284296 |
| | | (284296); PEG3(5178); DKFZp686I1569(400720); C20orf24 |
| | | (55969); SCRT2(85508); RBBP9(10741); C20orf112(140688); |
| | | GGTL3(2686); RP5-1054A22.3(85449); KCNS1(3787); WFDC5 |
| | | (149708); DIDO1(11083); ADARB1(104); NF2(4771); CABP7 |
| | | (164633); KDELR3(11015); SYN3(8224); TOB2(10766); |
| | | POLDIP3(84271); STS(412); WWC3(55841); OATL1(4943); |
| | | DRP2(1821); GRIPAP1(56850); |
| hsa-miR-448 | 121; 1170; 1171; 1172; | H6PD(9563); PRKAA2(5563); FPGT(8790); LRRC8C(84230); |
| | 1173; | HIPK1(204851); TNFAIP8L2(79626); DNM3(26052); C1orf9 |
| | | (51430); RALGPS2(55103); IL24(11009); FLJ12505(79805); |
| | | LOC440742(440742); OR2L13(284521); INPP5B(3633); |
| | | ANKRD38(163782); SERBP1(26135); PTGER3(5733); TTLL7 |
| | | (79739); TMED5(50999); SHC1 |

TABLE 4-94
(6464); EXOC8(149371); LYST(1130); AKT3(10000); MGC11266(79172);
RASGRP3(25780); CNGA3(1261); SLC9A4(389015); SLC5A7(60482);
LOC339745(339745); ACVR2A(92); ITGAV(3685); GLS(2744); ROCK2
(9475); EIF2AK2(5610); BCL11A(53335); KIAA1715(80856); GDF8
(2660); HECW2(57520); SF3B1(23451); USP37(57695); EPHA4(2043);
MTERFD2(130916); IGSF4D(253559); UNQ6125(442092); KCNAB1(7881);
OXTR(5021); SATB1(6304); VGLL3(389136); MORC1(27136); KIAA2018
(205717); KLHL6(89857); CPEB2(132864); STIM2(57620); PCDH7(5099);
REST(5978); THAP6(152815); PDLIM5(10611); SYNPO2(171024); LARP2
(55132); EDNRA(1909); SCC-112(23244); GABRG1(2565); GABRA4(2557);
RASSF6(166824); ANTXR2(118429); SPARCL1(8404); TMSL3(7117);
RG9MTD2(93587); SLC7A11(23657); C4orf13(84068); SPOCK3(50859);
LRP2BP(55805); OSMR(9180); PIK3R1(5295); ANKRD32(84250); HISPPD1
(23262); SLC12A2(6558); PCDHA9(9752); PCDHGB4(8641); ABLIM3
(22885); SEMA5A(9037); PRLR(5618); RICTOR(253260); PRKAA1(5562);
PLCXD3(345557); PAIP1(10605); MTX3(345778); MEF2C(4208); FBKL17
(64839); ACSL6(23305); FLJ44796(401209); KIF3A(11127); ETF1(2107);
GABRB2(2561); ENPP4(22875); OPN5(221391); COL19A1(1310); SMAP1
(60682); TBPL1(9519); FNDC1(84624); QKI(9444); KIAA0319(9856);
PKHD1(5314); B3GAT2(135152); SYNCRIP(10492); BACH2(60468);
MAP3K7(6885); CDC2L6(23097); ARL4A(10124); ADAM22(53616); MDFIC
(29969); DFNA5(1687); OSBPL3(26031); LSM5(23658); TFPI2(7980);
NAPE-PLD(222236); PPP1R3A(5506); ZNF705CP(389631); KIAA1456
(57604); LEPROTL1(23484); NRG1(3084); TACC1(6867); MTFR1(9650);
WWP1(11059); C8orf33(65265); SOX7(83595); EGR3(1960);
KCTD9(54793); IMPAD1(54928); UBE2W(55284); MMP16(4325); TMEM55A
(55529); GDF6(392255); SLC25A32(81034); ZNF406(57623); RRAGA
(10670); NTRK2(4915); C9orf47(286223); SLC44A1(23446); C9orf6
(54942); NEK6(10783); ZNF37A(7587); GHITM(27069); LDB3(11155);
HECTD2(143279); BTAF1(9044); KIAA1600(57700); DIP2C(22982); CXCL12
(6387); TMEM26(219623); GPAM(57678);SYT9(143425); IPO7(10527);
GPIAP1(4076); HSD17B12(51144); LRRC55(219527); CTNND1(1500); CNTN5
(53942);LOC399947(399947); FLJ46266(399949); FBXO3(26273); GRM5
(2915); SCN2B(6327); CACNA1C(775); GOLT1B(51026); LOC338809
(338809); FMNL3(91010); CAPS2(84698); C12orf30(80018); KL(9365);
KLF5(688); NDFIP2(54602); ATP11A(23250); F7(2155); XPO4(64328);
FLJ25477(219287);PFAAP5(10443); STARD13(90627); SPG20(23111);
LHFP(10186); KLF12(11278); IRS2(8660); MIPOL1(145282); ARF6(382);
FRMD6(122786); DACT1(51839); CPSF2(53981);FBXO33(254170); EXOC5
(10640); SIX4(51804); SG

TABLE 4-95

| | | |
|---|---|---|
| | | PP1(81537); ZFYVE26(23503); ATXN3(4287); SPRED1 |
| | | (161742); GLCE(26035); RCCD1(91433); LRRK1(79705); |
| | | NIPA1(123606); GABRB3(2562); MYEF2(50804); BNIP2 |
| | | (663); CALML4(91860); LASS3(204219); ABAT(18); GAN |
| | | (8139); GRIN2A(2903); XYLT1(64131); USP31(57478); |
| | | DOC2A(8448); MAF(4094); ZFP3(124961); BIRC4BP(54739); |
| | | FLJ35934(400579); G6PC(2538); ZNF161(7716); PMAIP1 |
| | | (5366); SPIRE1(56907); ZNF24(7572); BCL2(596); |
| | | LOC400657(400657); FLJ43870(400686); ZNF175(7728); |
| | | LOC390980(390980); ZFP260(339324); ZNF585A(199704); |
| | | ZNF160(90338); KCNB1(3745); TMEM1(7109); BTG3(10950); |
| | | HEMK2(29104); SYNJ1(8867); C21orf66(94104); LSS(4047); |
| | | CABP7(164633); CA5B(11238); CLCN5(1184); ZNF6(7552); |
| | | DIAPH2(1730); BIRC4(331); AFF2(2334); CXorf6(10046); |
| | | SPRY3(10251); PRKX(5613); HDHD1A(8226); KAL1(3730); |
| | | SH3KBP1(30011); EIF1AX(1964); ZDHHC15(158866); CHM |
| | | (1121); RP13-383K5.1(55285); AMOT(154796); SEPT6 |
| | | (23157); LAMP2(3920); ZFY(7544); TSPY1(7258); |
| hsa-miR-450 | 122; 3491; 1174; | ATAD3C(219293); DDI2(84301); LPPR4(9890); PALMD(54873); |
| | | C1orf161(126868); C1orf42(54544); VANGL2(57216); NOS1AP |
| | | (9722); DDR2(4921); PBX1(5087); CEP350(9857); RGL1 |
| | | (23179); C1orf71(163882); DNAJC11(55735); AGMAT(79814); |
| | | INSL5(10022); COL24A1(255631); SHC1(6464); ZNF281(23528); |
| | | YOD1(55432); PLXNA2(5362); DUSP10(11221); CEP170(9859); |
| | | XAB1(11321); C2orf29(55571); GPR39(2863); CREB1(1385); |
| | | AGXT(189); FLJ42418(400941); DNMT3A(1788); MCFD2(90411); |
| | | C1D(10438); TIA1(7072); MRPL53(116540); HS6ST1(9394); |
| | | GPR155(151556); ERBB4(2066); KCNJ13(3769); OTOS(150677); |
| | | CCR9(10803); C3orf1(51300); SOX2(6657); B3GNT5(84002); |
| | | LOC401072(401072); GCET2(257144); WDR5B(54554); TOPBP1 |
| | | (11073); ETV5(2119); RBPSUH(3516); CDS1(1040); METAP1 |
| | | (23173); DAPP1(27071); EXOSC9(5393); ELMOD2(255520); |
| | | ABCE1(6059); ARHGAP10(79658); FLJ38991(285521); MARCH1 |
| | | (55016); OSMR(9180); ISL1(3670); ARSK(153642); PCDHGB7 |
| | | (56099); SLC6A7(6534); ITK(3702); NSUN2(54888); ARTS- |
| | | 1(51752); COL23A1(91522); PHACTR1(221692); MOG(4340); |
| | | C2(717); EGFL8(80864); TTBK1(84630); FBXO9(26268); AMD1 |
| | | (262); NT5DC1(221294); PLN(5350); C6orf75(60487); C6orf71 |
| | | (389434); F13A1(2162); HIST1H1C(3006); HIST1H4D(8360); |
| | | DHX16(8449); C6orf199(221264); C6orf192(116843); SLC2Al2 |
| | | (154091); LPAL2(80350); GPR146(115330); WIPI2(26100); |
| | | EGFR(1956); TES(26136); ACTR3B(57180); DNAJB6(10049); |
| | | PMS2(5395); VPS41(27072); FLJ13576(64418); GRM8(2918); |
| | | MCPH1(79648); TMEM70(54968); GRHL2(79977); ENY2(56943); |
| | | KHDRBS3(10656); C8orf17(56988); PSD3(23362); TNFRSF10B |
| | | (8795); ANK1(286); TOX(9760); ZNF704(619279); RBM12B |
| | | (389677); SMC5L1(23137); C9orf85( |

TABLE 4-96

| | | |
|---|---|---|
| | | 138241); PALM2-AKAP2(445815); C9orf106(414318); GPR107 |
| | | (57720); OGN(4969); ALDOB(229); FBXW2(26190); TTLL11 |
| | | (158135); MGC61598(441478); PCGF4(648); PCDH21(92211); |
| | | CNNM1(26507); NEURL(9148); PLEKHA1(59338); CXCL12(6387); |
| | | EGR2(1959); FLJ44653(399833); MLSTD2(84188); TCP11L1 |
| | | (55346); EHF(26298); MGC2574(79080); TMEM16A(55107); |
| | | BLR1(643); APLP2(334); CD59(966); NRXN2(9379); SHANK2 |
| | | (22941); DRD2(1813); TRIM29(23650); OPCML(4978); CNOT2 |
| | | (4848); ASCL1(429); UBE3B(89910); RPH3A(22895); OAS3 |
| | | (4940); SPSB2(84727); PHB2(11331); LOC144233(144233); |
| | | ZNF385(25946); PPP1R12A(4659); CCDC41(51134); SOX1 |
| | | (6656); KATNAL1(84056); DCAMKL1(9201); KIAA1008(22894); |
| | | KLF12(11278); KCTD12(115207); C14orfl11(51077); |
| | | C14orf140(79696); KIAA0329(9895); EXOC5(10640); ENTPD5 |
| | | (957); SEL1L(6400); CHP(11261); Gcom1(145781); DNAJA4 |
| | | (55466); IL16(3603); MEIS2(4212); BMF(90427); CEP152 |
| | | (22995); MYO5A(4644); PRTG(283659); ANP32A(8125); STARD5 |
| | | (80765); MESP1(55897); SOLH(6650); CLUAP1(23059); |
| | | FLJ39599(255027); EEF2K(29904); ZNF553(197407); MAP1LC3B |
| | | (81631); FBXL16(146330); DEXI(28955); LITAF(9516); SMG1 |
| | | (23049); N4BP1(9683); TK2(7084); LOC654780(654780); |
| | | RAI1(10743); RAB11FIP4(84440); CDK5R1(8851); WIRE(147179); |
| | | CNP(1267); TNRC6C(57690); ZBTB4(57659); STX8(9482); |
| | | MGC23280(147015); FLJ31952(146857); PLXDC1(57125); GNA13 |
| | | (10672); RAB31(11031); VAPA(9218); SYT4(6860); TCEB3C |
| | | (162699); DYM(54808); TXNDC10(54495); ZSWIM4(65249); |
| | | FAM32A(26017); ZFP28(140612); ZNF562(54811); ZNF625(90589); |
| | | PLCB1(23236); TM9SF4(9777); SFRS6(6431); SGK2(10110); STK4 |
| | | (6789); COL9A3(1299); C20orf75(164312); KCNB1(3745); |
| | | AGPAT3(56894); CYYR1(116159); DSCAM(1826); SEC14L2(23541); |
| | | NDUFA6(4700); SHOX(6473); GPRASP1(9737); BIRC4(331); FHL1 |
| | | (2273); PRKX(5613); CRSP2(9282); NUDT11(55190); MCF2 |
| | | (4168); GABRA3(2556); |
| hsa-miR-451 | 123; 1175; 1176; 1177; | YTHDF2(51441); FAM73A(374986); SPATA1(64173); CYB561D1 |
| | 1178; 1179; 1180; 1181; | (284613); VANGL1(81839); IL6R(3570); CD1D(912); BAT2D1 |
| | | (23215); PAPPA2(60676); NR5A2(2494); DISC1(27185); |
| | | SSU72(29101); CTNNBIP1(56998); ZNF644(84146); GFI1 |
| | | (2672); GPATC4(54865); LZTR2(89866); ZNF281(23528); |
| | | MYOG(4656); C1orf145(574407); ZNF496(84838); KLF11 |
| | | (8462); LPIN1(23175); IL18R1(8809); FLJ37440(129804); |
| | | IMP4(92856); CTDSP1(58190); CAB39(51719); B3GNT7(93010); |
| | | OSR1(130497); PREPL(9581); PNPT1(87178); RAB1A(5861); |
| | | EIF2AK3(9451); MGC4268(83607); LOC130074(130074); TTC21B |
| | | (79809); SPBC25(57405); ATF2(1886); TTN(7273); ACADL(33); |
| | | THAP4(51078); RAB5A(5868); CRTAP(10491); MOBP(4336); |
| | | ZNF654(55279); HHLA2(11148); ZDHHC23(254887); C3orf1 |

TABLE 4-97
(51300); DTX3L(151636); GMPS(8833); LPP(4026); OXTR(5021);
RAFTLIN(23180); GADL1(339896); CMTM6(54918); ARHGEF3(50650);
PRICKLE2(166336); DCBLD2(131566); PLSCR2(57047); 1GSF10
(285313); PDCD10(11235); LSG1(55341); LPHN3(23284); EREG
(2069); AFAP(60312); USP46(64854); UBE1L2(55236); GRSF1
(2926); CXXC4(80319); FAM105A(54491); KIF2(3796); GRAMD3
(65983); MFAP3(4238); SFXN1(94081); MAML1(9794); SEMA5A
(9037); OXCT1(5019); PDE4D(5144); BIRC1(4671); ST8SIA4
(7903); DNAJC18(202052); DPYSL3(1809); KIAA0676(23061);
C6orf151(154007); BMP6(654); LOC221711(221711); LOC401252
(401252); POU3F2(5454); TCBA1(154215); ZDHHC14(79683);
SYNJ2(8871); NEDD9(4739); PSMB8(5696); TAPBP(6892); BAK1
(578); BACH2(60468); TXLNB(167838); PDCD2(5134); ZNRF2
(223082); DKFZp761I2123(83637); SVH(83787); CAV1(857);
ZNF398(57541); MEOX2(4223); TARP(445347); HIP1(3092);
AKR1B1(231); KIAA1456(57604); SLC39A14(23516); FNTA(2339);
YTHDF3(258943); CPNE3(8895); PTDSS1(9791); FAM91A1(157769);
PHF20L1(51105); BIN3(55909); STC1(6781); NSMAF(8439); MSC
(9242); ZNF704(619279); YWHAZ(7534); SMARCA2(6595); PCSK5
(5125); FAM73B(84895); CDKN2B(1030); C9orf48(347240); APBA1
(320); TNFSF15(9966); ASTN2(23245); RAB14(51552); FNBP1
(23048); UCK1(83549); TSC1(7248); MGC61598(441478); SEC23IP
(11196); ACADSB(36); GPR26(2849); BCCIP(56647); NUDT5
(11164); C10orf111(221060); RASGEF1A(221002); SPOCK2(9806);
SYNPO2L(79933); SFXN4(119559); SWAP70(23075); LUZP2(338645);
EHF(26298); STX3A(6809); Cllorf30(56946); ALDH3B2(222);
HBXAP(51773); SRPR(6734); CACNA1C(775); C12orf5(57103);
CLEC2D(29121); AEBP2(121536); PFDN5(5204); CUTL2(23316);
ZNF140(7699); DUSP16(80824); DBX2(440097); FMNL3(91010);
CDK4(1019); OSBPL8(114882); NT5DC3(51559); KCTD10(83892);
WDFY2(115826); UPF3A(65110); SLITRK1(114798); ATP4B(496);
BATF(10538); EVL(51466); CRIP2(1397); EGLN3(112399); SPTB
(6710); WDR22(8816); FBLN5(10516); KLF13(51621); CAPN3(825);
GALK2(2585); FAM63B(54629); NIPA1(123606); ZFP106(64397);
TTBK2(146057); ARPP-19(10776); ADAM10(102); KIAA0101(9768);
CALML4(91860); NPTN(27020); C15orf40(123207); PMM2(5373);
PRO0149(29035); ADCY7(113); CYLD(1540); KIAA0174(9798);
RPL13(6137); GRIN2A(2903); FTS(64400); SLC7A6OS(84138);
M-RIP(23164); C17orf39(79018); DRG2(1819); CPD(1362); PSMD11
(5717); DDX42(11325); SLC16A3(9123); CXCL16(58191); DHX33
(56919); ACACA(31); TMEM105(284186); LIPG(9388); AQP4(361);
RKHD2(51320); ZADH2(284273); MBP(4155); SCAMP4(113178); GCDH
(2639); F2RL3(9002); KIAA0892(23383); GATAD2A(54815); SAMD4B
(55095);

TABLE 4-98

| | | |
|---|---|---|
| | | PLEKHG2(64857); LENG8(114823); ZNF272(10794); PRG2 |
| | | (79948); CDKN2D(1032); ERCC2(2068); KIAA1219(57148); |
| | | KCNK15(60598); STK4(6789); VSX1(30813); CBLN4(140689); |
| | | ATP5E(514); C21orf63(59271); PDXK(8566); ADARB1(104); |
| | | BAGE(574); C21orf91(54149); C21orf129(150135); PTTG1IP |
| | | (754); POFUT2(23275); LSS(4047); TBX1(6899); UBE2L3 |
| | | (7332); MIF(4282); PPARA(5465); CRELD2(79174); CECR5 |
| | | (27440); DGCR2(9993); DGCR13(26221); C22orf23(84645); |
| | | CELSR1(9620); CERK(64781); MSL3L1(10943); CA5B(11238); |
| | | GK(2710); ZNF81(347344); OGT(8473); RP6-213H19.1(51765); |
| | | ZIC3(7547); PNMA6A(84968); GDI1(2664); ZBED1(9189); |
| | | FAM9C(171484); CXorf21(80231); DDX3Y(8653); |
| hsa-miR-452 | 124; 1182; | PRDM16(63976); C1orfl51(440574); ZYG11B(79699); LPPR4 |
| | | (9890); FDPS(2224); DDR2(4921); Clorf9(51430); NR5A2 |
| | | (2494); SRGAP2(23380); FMN2(56776); VAV3(10451); CD5L |
| | | (922); LMX1A(4009); WDR26(80232); ENAH(55740); ITPKB |
| | | (3707); AKT3(10000); RAB3GAP1(22930); PPIG(9360); |
| | | BMPR2(659); LOC93349(93349); SRD5A2(6716); NRXN1(9378); |
| | | SERTAD2(9792); MGAT4A(11320); FLJ34870(401013); SCN1A |
| | | (6323); SLC25Al2(8604); RAPH1(65059); PER2(8864); |
| | | UNQ6125(442092); MRAS(22808); C3orf48(151649); CYP8B1 |
| | | (1582); EIF4E3(317649); TNIK(23043); LRRC15(131578); |
| | | KLHL5(51088); RAB28(9364); KCNIP4(80333); USP46(64854); |
| | | ANKRD50(57182); WDR36(134430); DMXL1(1657); GALNT10 |
| | | (55568); TPPP(11076); LIX1(167410); SPARC(6678); ZNF192 |
| | | (7745); IL20RA(53832); PIP3-E(26034); PDE10A(10846); |
| | | DKFZp76112123(83637); SUMF2(25870); ASB4(51666); |
| | | FLJ121986(79974); CALU(813); HIPK2(28996); FLJ31413 |
| | | (155061); FLJ12700(79970); ZDHHC2(51201); SLC7A2(6542); |
| | | WHSC1L1(54904); REXO1L1(254958); C9orf42(116224); NTRK2 |
| | | (4915); FGD3(89846); NR4A3(8013); BNC2(54796); CDKN2B |
| | | (1030); IGFBPL1(347252); KIAA0367(23273); TRIM14(9830); |
| | | FNBP1(23048); ZNF37A(7587); SFTPA1(6435); CCNJ(54619); |
| | | NEURL(9148); SFTPA2(6436); SH3PXD2A(9644); EBF3(253738); |
| | | DIXDC1(85458); FLJ42258(440049); KCNE3(10008); OPCML |
| | | (4978); PHC1(1911); ETV6(2120); NAV3(89795); NUDT4 |
| | | (11163); SFRS8(6433); CTDSP2(10106); GNS(2799); TMCC3 |
| | | (57458); GIT2(9815); LRCH1(23143); PCDH9(5101); C14orf92 |
| | | (9878); SPG3A(51062); SAV1(60485); TCL1A(8115); C14orf103 |
| | | (55102); CHRNA7(1139); SLC24A5(283652); TMOD2(29767); |
| | | ABHD2(11057); MEF2A(4205); PRTG(283659); PRO0149(29035); |
| | | MKL2(57496); MGC35048(124152); POLR3E(55718); FLJ13912 |
| | | (64785); ADCY9(115); CARHSP1(23589); GRIN2A(2903); BOLA2 |
| | | (552900); DOC2A(8448); CMTM4(146223); MYO15A(51168); KSR1 |
| | | (8844); PLXDC1(57125); KRTAP4-12(83755); BRCA1(672); |
| | | LRRC59(55379); SFRS1(6426); DTNA(1837); SETBP1(26040); |
| | | RNF165(494470); |

TABLE 4-99

| | | CDH19(28513); LOC90580(90580); ZNF230(7773); CRX |
|---|---|---|
| | | (1406); ZNF264(9422); PIP5K1C(23396); INSR(3643); |
| | | LENG9(94059); POFUT1(23509); CBFA2T2(9139); PHF20 |
| | | (51230); CDH4(1002); NAPB(63908); ATP9A(10079); |
| | | APOL1(8542); TNRC6B(23112); PRRG1(5638); TMEM47 |
| | | (83604); OPHN1(4983); |
| hsa-miR-487b | 125; 1183; 1184; | DFFB(1677); EFED2(79180); PQLC2(54896); LOC339524 |
| | 1185; 3492; 1186; | (339524); SLC30A7(148867); HSPA6(3310); CEP350(9857); |
| | | SRP9(6726); RHOU(58480); TMEM53(79639); SPATA6 |
| | | (54558); EVI5(7813); C1orf183(55924); ST7L(54879); |
| | | TSPAN2(10100); WARS2(10352); ANP32E(81611); ANKRD45 |
| | | (339416); C1orf55(163859); ABCG8(64241); PTPN18(26469); |
| | | TTGA6(3655); DNAJC10(54431); NAB1(4664); FLJ38973 |
| | | (205327); LOC339789(339789); GFPT1(2673); MGC4268 |
| | | (83607); ORC4L(5000); IRS1(3667); HDAC4(9759); STAC |
| | | (6769); KBTBD8(84541); EPHA3(2042); ZDHHC23(254887); |
| | | ZIC1(7545); TMEM40(55287); LOC285382(285382); FLJ39370 |
| | | (132720); WWC2(80014); CARF(55602); AGA(175); PMCHL1 |
| | | (5369); OSMR(9180); FLJ13611(80006); OXCT1(5019); UNG2 |
| | | (10309); KLHL3(26249); SPRY4(81848); GMCL1L(64396); |
| | | RNF182(221687); CSNK2B(1460); C6orf195(154386); CPNE5 |
| | | (57699); ZNF318(24149); SNAP91(9892); TFB1M(51106); |
| | | TTYH3(80727); GLCCI1(113263); GRM3(2913); ARS2(51593); |
| | | STEAP4(79689); KIAA1456(57604); SLC26A7(115111); |
| | | LAPTM4B(55353); TNFRSF10B(8795); FGFR1(2260); SAMD12 |
| | | (401474); FBXO32(114907); C8orf51(78998); RXRA(6256); |
| | | SEMA4D(10507); MGC61598(441478); NELF(26012); LOC399706 |
| | | (399706); STAM(8027); SFTPA1(6435); ZRANB1(54764); |
| | | VENTX(27287); SFTPA2(6436); RPL27A(6157); PCF11(51585); |
| | | DLAT(1737); ACVR1B(91); NUDT4(11163); ZNF664(144348); |
| | | EP400(57634); DIABLO(56616); RSN(6249); SLC15A4(121260); |
| | | RIMBP2(23504); LRCH1(23143); FLJ40296(122183); IRS2 |
| | | (8660); PSMC1(5700); YY1(7528); ZNF219(51222); GPR135 |
| | | (64582); DIO2(1734); C14orf103(55102); GOLGA8E(390535); |
| | | GOLGA8G(283768); CHD2(1106); UNQ9370(400454); ALDH1A3 |
| | | (220); ATP10A(57194); MFAP1(4236); SUHW4(54816); PARP16 |
| | | (54956); TSPAN3(10099); TBC1D2B(23102); MGC2654(79091); |
| | | KIAA0251(23042); HERPUD1(9709); KIAA0513(9764); CMTM4 |
| | | (146223); MAP2K4(6416); SPECC1(92521); WSB1(26118); |
| | | CRYBA1(1411); RAB11FIP4(84440); PRKCA(5578); FLJ34922 |
| | | (91607); CCDC46(201134); RAB12(201475); DTNA(1837); |
| | | RNF165(494470); SMAD2(4087); ZADH2(284273); APC2(10297); |
| | | IXL(55588); FLJ25758(497049); ANKRD25(25959); ZNF709 |
| | | (163051); KIAA1219(57148); PAK7(57144); TRPC4AP(26133); |
| | | PRKCBP1(23613); DIDO1(11083); USP25(29761); ITSN1(6453); |
| | | TRIOBP(11078); C22orf8(55007); UBQLN2(29978); ARMCX1 |
| | | (51309); SSX3(10214); SLC7A3(84889); TMEM32(93380); IDS |
| | | (3423); |

TABLE 4-100

| | | |
|---|---|---|
| hsa-miR-489 | 126; 1187; 1188; | ZBTB8(127557); KIAA0467(23334); RBM8A(9939); DISC1 |
| | 1189; 1190; 1191; | (27185); PEX19(5824); PTGS2(5743); USH2A(7399); ENAH |
| | | (55740); NCOA1(8648); SELI(85465); PPP1CB(5500); MAP4K4 |
| | | (9448); IL1R1(3554); KYNU(8942); MGC13057(84281); NRP2 |
| | | (8828); EDAR(10913); DKFZP566N034(81615); SCN3A(6328); |
| | | SYN2(6854); ITGA9(3680); NKTR(4820); LIMD1(8994); |
| | | FBXO40(51725); ACAD9(28976); DCBLD2(131566); PTPLB |
| | | (201562); RFC4(5984); SMR3B(10879); NFXL1(152518); ASAP |
| | | (79884); LOC285636(285636); NLN(57486); F2R(2149); ARSK |
| | | (153642); FLJ90650(206338); MEGF10(84466); KIAA0141(9812); |
| | | TTBK1(84630); ANKRD6(22881); FOXO3A(2309); BCLAF1(9774); |
| | | PIP3-E(26034); AGPAT4(56895); ITGB8(3696); ZNRF2(223082); |
| | | DKFZp761I2123(83637); LOC90639(90639); SLC25A37(51312); |
| | | TRIM55(84675); FAM49B(51571); C9orf47(286223); NR4A3(8013); |
| | | FSD1CL(405752); FREQ(23413); IGFBPL1(347252); RBM18(92400); |
| | | DENND1A(57706); CUGBP2(10659); SGPL1(8879); SFTPA1(6435); |
| | | TMEM20(159371); TCF7L2(6934); KCNMA1(3778); SFTPA2(6436); |
| | | CPEB3(22849); ARL3(403); BLR1(643); ADAMTS15(170689); CD59 |
| | | (966); SLC1A2(6506); SYT13(57586); SHANK2(22941); CDON |
| | | (50937); FKBP4(2288); MDM2(4193); PEBP1(5037); ATP6V0A2 |
| | | (23545); EP400(57634); CBX5(23468); GNS(2799); APRIN(23047); |
| | | RANBP5(3843); C13orf6(84945); KIAA1008(22894); KIAA1333 |
| | | (55632); KIAA0247(9766); ADCK1(57143); FLRT2(23768); OTUB2 |
| | | (78990); NOVA1(4857); SPTLC2(9517); GTF2A1(2957); PLDN |
| | | (26258); TLN2(83660); TPM1(7168); ADCY9(115); EIF4A1(1973); |
| | | RAB11FIP4(84440); STXBP4(252983); ACE(1636); KCNJ2(3759); |
| | | SYT4(6860); MCEMP1(199675); ZNF257(113835); ZIK1(284307); |
| | | PLVAP(83483); CHD6(84181); CTSZ(1522); SYCP2(10388); AGPAT3 |
| | | (56894); PRSS7(5651); TIMP3(7078); APOL6(80830); SYNGR1(9145); |
| | | MAPK1(5594); NHS(4810); RP13-102H20.1(158763); ATP2B3(492); |
| | | FAM9C(171484); TRAPPC2(6399); GAB3(139716); |
| hsa-miR-514 | 127; 1192; 1193; | EIF2C4(192670); HIPK1(204851); SYNC1(81493); SNIP1(79753); |
| | 1194; 1195; 1196; | SERBP1(26135); YOD1(55432); TRIB2(28951); INPP4A(3631); |
| | | LOC93349(93349); RAPH1(65059); SRGAP3(9901); EIF4E3(317649); |
| | | VGLL3(389136); CD200R1(131450); C4orf12(404201); TRIM2 |
| | | (23321); ARSB(411); SEMA6A(57556); AFF4(27125); FGFR1OP |
| | | (11116); PKHD1(5314); VNN3(55350); AGPAT4(56895); EGFR(1956); |
| | | H-plk(51351); CLN8(2055); BAALC(79870); SLC30A8(169026); |
| | | UBE2R2(54926); LOC440558(440558); RAI17(57178); BTRC(8945); |
| | | AKR1CL1(340811); SYT15(83849); TEAD1(7003); SESN3(143686); |
| | | SNX19(399979); CLLU1(574028); ANKRD13(88455); KIAA0152(9761); |
| | | FAM101A(144347); SLCO1A2(6579); SSH1(54434); SPATA13(221178); |
| | | AKAP11(11215); NPAS3(64067); C14orf101(54916); R |

TABLE 4-101

| | | AB11A(8766); ABHD2(11057); TNT(162083); DYNC1LI2(1783); |
|---|---|---|
| | | TNFRSF11A(8792); TCEB3C(162699); CARM1(10498); ZNF350 |
| | | (59348); PEG3(5178); RP5-1103G7.6(400830); C20orf91(284800); |
| | | NAPB(63908); KCNB1(3745); MAPK11(5600); GPR23(2846); |
| hsa-miR-517c | 128; 3493; 1528; | PRKCZ(5590); PHF13(148479); EFHD2(79180); CLIC4(25932); |
| | | CCDC28B(79140); C1orf108(79647); ZYG11B(79699); CPT2(1376); |
| | | NFIA(4774); USP1(7398); TMEM56(148534); SMG7(9887); SDF4 |
| | | (51150); KIAA0495(57212); EIF4G3(8672); WNT4(54361); LUZP1 |
| | | (7798); ZNF436(80818); IL22RA1(58985); PAQR7(164091); FOXJ3 |
| | | (22887); SLC6A9(6536); JUN(3725); C1orf173(127254); OLFM3 |
| | | (118427); NPHS2(7827); DENND1B(163486); KIF21B(23046); |
| | | TNNI1(7135); PCNXL2(80003); IRF2BP2(359948); HNRPU(3192); |
| | | POLR1B(84172); PSMD1(5707); PDIA6(10130); FLJ14397(84865); |
| | | LYPD1(116372); STK39(27347); GPR55(9290); NR1D2(9975); BSN |
| | | (8927); IGSF4D(253559); ALCAM(214); SGEF(26084); PPM1L |
| | | (151742); SKIL(6498); OXTR(5021); SRGAP3(9901); TMEM111 |
| | | (55831); HYAL1(3373); LRIG1(26018); RYBP(23429); ABI3BP |
| | | (25890); SEMA5B(54437); TMCC1(23023); MGC40579(256356); |
| | | LOC348840(348840); SLIT2(9353); AREG(374); LARP2(55132); |
| | | STOX2(56977); SLC26A1(10861); PPP2R2C(5522); AFAP(60312); |
| | | LOC201895(201895); APBB2(323); PGDS(27306); TNIP3(79931); |
| | | ENPP6(133121); ISL1(3670); SERF1A(8293); CDC42SE2(56990); |
| | | MFAP3(4238); SMA5(11042); FCHSD1(89848); SH3TC2(79628); |
| | | TNIP1(10318); DBN1(1627); MAPK9(5601); DKFZp686I15217 |
| | | (401232); HFE(3077); HIST1H2AG(8969); EGFL8(80864); TTBK1 |
| | | (84630); SH3BGRL2(83699); GPR126(57211); TULP4(56995); |
| | | RP11-145H9.1(340156); GFOD1(54438); RNF39(80352); TMEM30A |
| | | (55754); BACH2(60468); MCHR2(84539); STX7(8417); EPM2A |
| | | (7957); NUPL2(11097); FLJ90586(135932); HOXA5(3202); |
| | | TNS3(64759); TNKS(8658); PTK2B(2185); ADAM9(8754); KCNS2 |
| | | (3788); COLEC10(10584); LGI3(203190); TRIM35(23087); |
| | | KIF13B(23303); PLAT(5327); RDHE2(195814); TRPA1(8989); |
| | | JPH1(56704); ST3GAL1(6482); STKBP1(6812); CDKN2A(1029); |
| | | SMU1(55234); RFK(55312); TSCOT(57864); TRAF1(7185); |
| | | DENND1A(57706); PTGES(9536); AKR1C4(1109); MGC16291 |
| | | (84856); LRRTM3(347731); Cl0orf39(282973); LRRC27(80313); |
| | | FRMD4A(55691); RSU1(6251); MARCH8(220972); C10orf54 |
| | | (64115); C11orf36(283303); MADD(8567); MS4A4A(51338); |
| | | PACS1(55690); NPAS4(266743); ARCN1(372); STS-1(84959); |
| | | CDKN1C(1028); C11orf55(399879); KCTD14(65987); FLJ38159 |
| | | (220388); KRTHB6(3892); PFDN5(5204); LEMD3(23592); THAP2 |
| | | (83591); LOC338809(338809); SUDS3(64426); FLK38663(91574); |
| | | BHLHB3(79365); Cl2orf22(81566); IGF1(3479); Cl2orf49(79794); |
| | | MGC7036(196383); SLITRK1(114798); SMOC1(64093); C14orfl30 |
| | | (5514 |

TABLE 4-102

| | | |
|---|---|---|
| | | 8); BDKRB2(624); CCNK(8812); KIAA0125(9834); PRMT5 |
| | | (10419); KCNH5(27133); FLJ39779(400223); SYNJ2BP |
| | | (55333); SPTLC2(9517); LOC440248(440248); RNF111 |
| | | (54778); APH1B(83464); SMAD3(4088); KIAA1199(57214); |
| | | ALPK3(57538); PRTG(283659); SLTM(79811); SEC11L1 |
| | | (23478); TARSL2(123283); E4F1(1877); PDPK1(5170); |
| | | SPN(6693); TP53TG3(24150); NKD1(85407); PSKH1(5681); |
| | | SPG7(6687); LOC339123(339123); CTRL(1506); MGC26885 |
| | | (124044); C17orf49(124944); RAB11FIP4(84440); RAPGEFL1 |
| | | (51195); XYLT2(64132); CACNG4(27092); KCNJ2(3759); |
| | | CDK3(1018); BAIAP2(10458); HEXDC(284004); VAMP2(6844); |
| | | GAS7(8522); MYH4(4622); FLJ31196(146802); TCF2(6928); |
| | | KRT9(3857); MAP3K14(9020); SFRS1(6426); LIMD2(80774); |
| | | CCDC47(57003); CCDC46(201134); HELZ(9931); C17orf62 |
| | | (79415); WDR45L(56270); B3GNTL1(146712); CTDP1(9150); |
| | | MPPE1(65258); ANKRD29(147463); ZNF521(25925); DYM |
| | | (54808); CBLN2(147381); NCLN(56926); TNFAIP8L1(126282); |
| | | MRPL4(51073); LDLR(3949); UBA52(7311); GRAMD1A(57655); |
| | | FFAR2(2867); PRMT1(3276); FCAR(2204); FLJ45684(400666); |
| | | GNG7(2788); ZBTB7A(51341); CACNA1A(773); HAPLN4(404037); |
| | | SF4(57794); NALP7(199713); ATRN(8455); CBFA2T2(9139); |
| | | C20orf118(140711); C20orf77(58490); STK4(6789); C20orf11 |
| | | (54994); ZGPAT(84619); CTSZ(1522); JAM2(58494); KIAA0179 |
| | | (23076); SEPT5(5413); ADRBK2(157); HTF9C(27037); IGLL1 |
| | | (3543); CBX6(23466); C22orf9(23313); RP1-29C18.7(348645); |
| | | CLCN4(1183); OATL1(4943); PLP2(5355); GPR64(10149); |
| | | AMMECR1(9949); IRAK1(3654); |
| hsa-miR-518c | 129; 3494; 1197; 1198; | ACOT7(11332); PRICKLE2(166336); WHSC1(7468); |
| | 1529; 1530; 1531; 1532; | SH3PXD2B(285590); PMS2L5(5383); TOLLIP(54472); SHANK2 |
| | | (22941); BCL9L(283149); ACVR1B(91); KIAA0152(9761); |
| | | ABCB9(23457); MCF2L(23263); SOCS4(122809); FLJ12998 |
| | | (64779); VAPB(9217); AP1G1(164); AK1(203); ASGR1(432); |
| | | FOXL2(668); C2lorf2(755); CACNB1(782); CD5(921); CD6 |
| | | (923); CDKN1C(1028); CDKN2B(1030); CDS1(1040); CHI3L1 |
| | | (1116); CLCN6(1185); CPT1B(1375); CSRP1(1465); CXADR |
| | | (1525); DAP(1611); DHFR(1719); DMWD(1762); DNMT3A |
| | | (1788); DRD4(1815); EFNA4(1945); EGR1(1958); EGR4(1961); |
| | | ELN(2006); CLN8(2055); ETV1(2115); EXTL1(2134); FOSL2 |
| | | (2355); FZD2(2535); GUCA1A(2978); H1F0(3005); HADHSC |
| | | (3033); MR1(3140); NR4A1(3164); HOXA3(3200); HOXC5(3222); |
| | | HOXC8(3224); HSD17B1(3292); IL8(3576); IL13RA1(3597); |
| | | ITGA1(3672); LEP(3952); MBP(4155); MDS1(4197); MAP3K9 |
| | | (4293); MVD(4597); MYO5A(4644); MYOD1(4654); NFE2L1(4779); |
| | | NNMT(4837); NRGN(4900); OPA1(4976); ORC5L(5001); P2RX7 |
| | | (5027); PAFAH1B2(5049); PDGFRB(5159); PEX10(5192); PKNOX1 |
| | | (5316); PPP2R1A(5518); PRKG2(5593); MAPK1(5594); PTPN1 |
| | | (5770); PTPRG(5793) |

TABLE 4-103

| | | |
|---|---|---|
| | | ; RAP1B(5908); RASGRF2(5924); RBBP8(5932); RPL10(6134); |
| | | RPS9(6203); SCN2B(6327); SIX3(6496); SNX1(6642); SOX11 |
| | | (6664); STK4(6789); TCN2(6948); TEAD3(7005); TFE3(7030); |
| | | TGFBR3(7049); THRA(7067); TLL2(7093); TRAF3(7187); TSN |
| | | (7247); TSTA3(7264); WBSCR1(7458); ZFP36(7538); |
| hsa-miR-524* | 130; 1533; 1534; 1535; | Clorf108(79647); ZYG11B(79699); NFIA(4774); GIPC2 |
| | | (54810); VANGL1(81839); UHMK1(127933); FUSIP1(10772); |
| | | TAL1(6886); SERBP1(26135); SHE(126669); SELI(85465); |
| | | MXD1(4084); KLHL23(151230); CREB1(1385); PUM2(23369); |
| | | SLC25A12(8604); PGAP1(80055); LIMD1(8994); HHLA2 |
| | | (11148); PPM1L(151742); KLHL24(54800); OPA1(4976); |
| | | VGLL3(389136); LRRC15(131578); TFRC(7037); SLC34A2 |
| | | (10568); GALNT7(51809); WDFY3(23001); FGA(2243); |
| | | SLC26A2(1836); SEMA5A(9037); P4HA2(8974); ZNF192(7745); |
| | | C6orf55(51534); STK38(11329); CREB5(9586); EGFR(1956); |
| | | LOC441257(441257); CALU(813); MKLN1(4289); MEOX2(4223); |
| | | DRCTNNB1A(84668); JAZF1(221895); CDK6(1021); HOOK3(84376); |
| | | PSD3(23362); WHSC1L1(54904); MGC21881(389741); C9orf47 |
| | | (286223); STRBP(55342); CREM(1390); CCDC6(8030); DLG5 |
| | | (9231); TEAD1(7003); SBF2(81846); SPTY2D1(144108); |
| | | SLC1A2(6506); CTSC(1075); SESN3(143686); KLHDC5(57542); |
| | | HMGA2(8091); NUDT4(11163); JARID1A(5927); MGC24039(160518); |
| | | ZCRB1(85437); PRICKLE1(144165); FAM19A2(338811); NBEA |
| | | (26960); LRCH1(23143); FLJ40296(122183); NUFIP1(26747); |
| | | VPS36(51028); MIPOL1(145282); SOCS4(122809); PSEN1(5663); |
| | | EXOC5(10640); C14orf103(55102); CDC42BPB(9578); SNX1(6642); |
| | | TTBK2(146057); GNAO1(2775); NFATC3(4775); PDPR(55066); |
| | | GSPT1(2935); USP31(57478); CMTM4(146223); STXBP4(252983); |
| | | TRIM25(7706); SMURF2(64750); SEH1L(81929); SMAD2(4087); |
| | | CDH19(28513); FLJ00060(90011); ZNF100(163227); MOCS3(27304); |
| | | JAG1(182); BRWD1(54014); MAPK1(5594); RBM9(23543); ZC3H12B |
| | | (340554); YIPF6(286451); NLGN4Y(22829); |
| hsa-miR-542-3p | 131; 1199; 1200; 1201; | SEPN1(57190); CLCC1(23155); SPTBN1(6711); TMEM127 |
| | 3495; | (55654); WDR33(55339); PGAP1(80055); ZNF621(285268); |
| | | SIDT1(54847); ARGFX(503582); UBP1(7342); WHSC1(7468); |
| | | PIK3R1(5295); MAP1B(4131); TPPP(11076); KIAA1919 |
| | | (91749); ESR1(2099); ATXN1(6310); HBS1L(10767); |
| | | TFB1M(51106); FOXK1(221937); CREB5(9586); ADCY1(107); |
| | | PMS2L2(5380); CA13(377677); C9orf100(84904); TSC1 |
| | | (7248); CHST3(9469); GPR26(2849); ADARB2(105); FAM26C |
| | | (255022); MON2(23041); ATP8A2(51761); C14orf111(51077); |
| | | C14orf118(55668); BNIP2(663); LYSMD4(145748); KIAA1924 |
| | | (197335); STARD3(10948); PNPO(55163); BIRC5(332); TMEM101 |
| | | (84336); TRIM85(201292); SERPINB8(5271); ZADH2(284273); |
| | | APOE(348); ZNF264(9422); ADAMTSL5(339386); HAPLN4(404037); F |

TABLE 4-104

| | | |
|---|---|---|
| | | LJ41131(284325); LOC284296(284296); STK35(140901); ASXL1 |
| | | (171023); MMP24(10893); DIDO1(11083); ICOSLG(23308); PDHA1 |
| | | (5160); YIPF6(286451); |
| hsa-miR-544 | 132; 1202; 1203; | NBPF3(84224); GNAI3(2773); NBPF15(284565); C1orf21(81563); |
| | | TTMB(399474); TMED5(60999); WARS2(10352); NBPF11(200030); |
| | | NBPF14(25832); ASTN(460); ENAH(55740); SELI(85465); BMPR2 |
| | | (659); ABI2(10152); AFF3(3899); ORC4L(5000); CACNB4(785); |
| | | KIF1A(547); TGFBR2(7048); NKTR(4820); SACM1L(22908); FOXP1 |
| | | (27086); GENX-3414(8987); WDFY3(23001); MFAP3L(9848); |
| | | LRP2BP(55805); NDFIP1(80762); MGC23909(153339); STK10 |
| | | (6793); COL19A1(1310); SH3BGRL2(83699); NUDT3(11165); TRAM2 |
| | | (9697); UBE2D4(51619); VKORC1L1(154807); INHBA(3624); PURB |
| | | (5814); CALN1(83698); GCC1(79571); VCPIP1(80124); TSPYL5 |
| | | (85453); C9orf91(203197); CCDC6(8030); CPEB3(22849); COX15 |
| | | (1355); SH3PXD2A(9644); ADAM12(8038); TEAD1(7003); LRRC55 |
| | | (219527); VDR(7421); SSH1(54434); POP5(51367); SBNO1(55206); |
| | | LOC400120(400120); RAP2A(5911); RANBP5(3843); ARHGEF7(8874); |
| | | FLJ25477(219287); KATNAL1(84056); EFNB2(1948); LTB4R2(56413); |
| | | ARF6(382); MAMDC1(161357); DICER1(23405); CAPN3(825); Gcom1 |
| | | (145781); KIAA1024(23251); CRISPLD2(83716); GRIN2A(2903); |
| | | XYLT1(64131); TNFAIP1(7126); CCDC55(84081); CDK5RAP3(80279); |
| | | NUFIP2(57582); BRCA1(672); TRIM25(7706); C18orf45(85019); |
| | | EMR2(30817); CBFA2T2(9139); DNAJC5(80331); NSFL1C(55968); |
| | | TBL1X(6907); EIF1AX(1964); PCYT1B(9468); PHKA1(5255); |
| | | CD99L2(83692); MECP2(4204); |
| hsa-miR-545 | 133; | H6PD(9563); KIF1B(23095); PQLC2(54896); EIF2C4(192670); |
| | | CDC20(991); C1orf83(127428); BXDC5(80135); RTCD1(8634); |
| | | RAP1A(5906); VANGL1(81839); UHMK1(127933); DDR2(4921); |
| | | DNM3(26052); C1orf76(148753); LGALS8(3964); MTR(4548); |
| | | GNB1(2782); DNAJC11(55735); KIAA0319L(79932); HPCAL4 |
| | | (51440); BMP8B(656); SPATA6(54558); GBP4(115361); IGSF3 |
| | | (3321); PIK4CB(5298); FCRL5(83416); SH2D1B(117157); |
| | | NMNAT2(23057); TNNI1(7135); LPGAT1(9926); PGBD5(79605); |
| | | RAB10(10890); YIPF4(84272); SLC1A4(6509); FLJ16124(440867); |
| | | MRPL19(9801); STEAP3(55240); CCNT2(905); RIF1(55183); |
| | | FMNL2(114793); LASS6(253782); ZNF650(130507); FLJ13096 |
| | | (80067); BMPR2(659); ABI2(10152); REEP1(65055); IL1A(3552); |
| | | WDR83(55339); TRIP12(9320); OXNAD1(92106); CRTAP(10491); |
| | | ZNF621(285268); PXK(54899); EPHA3(2042); KALRN(8997); |
| | | KIAA1143(57456); QRICH1(54870); EIF4E3(317649); RABL3 |
| | | (285282); MYLK(4638); P2RY13(53829); PCYT1A(5130); WHSC1 |
| | | (7468); TBC1D14(57533); MOBKL1A(92597); FLJ20032(54790); |
| | | LRPAP1(4043); EIF4E(1977); CAMK2D(817); C4orf18(51313); |
| | | CBR4(84869); SORBS2(8470); ITGA1(3672); PI |

TABLE 4-105
K3R1(5295); PTCD2(79810); LOC90355(90355); FLJ90650(206338);
GRAMD3(65983); PCDHB9(56127); ARHGAP26(23092); G3BP(10146);
PRLR(5618); ALDH7A1(501); CDC23(8697); ADAM19(8728); DUSP1
(1843); IRF4(3662); PRPF4B(8899); HDGFL1(154150); LOC401252
(401252); NFYA(4800); C6orf65(221336); COL19A1(1310); FOXO3A
(2309); KIAA1919(91749); IHPK3(117283); TRFP(9477); FLJ41841
(401263); PKHD1(5314); PTPRK(5796); AGPAT4(56895); PDE10A
(10846); PHF14(9678); ARL4A(10124); ZNRF2(223082); EGFR(1956);
LOC441257(441257); ASB15(142685); TRIM24(8805); LUC7L2(51631);
JAZF1(221895); TMED4(222068); H2AFV(94239); PURB(5814); CALCR
(799); PODXL(5420); ZC3HAV1(56829); KBTBD11(9920); VPS13B
(157680); FZD6(8323); EGR3(1960); GTF2E2(2961); EDD1(51366);
CYP11B1(1584); OSTF1(26578); VPS13A(23230); NTRK2(4915);
C9orf47(286223); TGFBR1(7046); OLFML2A(169611); USP20(10868);
RLN2(6019); DDX58(23586); RNF38(152006); KIAA0367(23273); IPPK
(64768); PTCH(5727); ROD1(9991); TOR2A(27433); CUGBP2(10659);
ARL5B(221079); KIAA1274(27143); TMEM20(159371); PI4KII(55361);
ENTPD7(57089); HIF1AN(55662); SLK(9748); PNLIPRP3(119548);
SEC23IP(11196); TACC2(10579); ACADSB(36); VENTX(27287); DNAJC12
(56521); HTR7(3363); TMEM10(93377); PIK3AP1(118788);
ARHGAP19(84986); VAX1(11023); MKI67(4288); SPCS2(9789);
C11orf54(28970); IL10RA(3587); BET1L(51272); NUP98(4928); XLKD1
(10894); CSRP3(8048); PGM2L1(283209); RAB30(27314); PDGFD
(80310); ARHGAP20(57569); PRDM10(56980); ETNK1(55500); STK38L
(23012); KLHDC5(57542); FGD4(121512); GPD1(2819); C12orf28
(196446); ZNF10(7556); RAD52(5893); BCAT1(586); DBX2(440097);
SLC41A2(84102); UFM1(51569); TNFSF13B(10673); ATP11A(23250);
TFDP1(7027); XPO4(64328); FLJ25477(219287); SLC7A1(6541);
FLJ10154(55082); RNF31(55072); PELI2(57161); C14orf118(55668);
K1AA1737(85457); FLRT2(23768); TCL6(27004); SOS2(6655); C14orf43
(91748); GLDN(342035); FEM1B(10116); ARIH1(25820); HMG20A(10363);
IREB2(3658); ADAMTSL3(57188); SCAND2(54581); ALPK3(57538); ABHD2
(11057); TTBK2(146057); MYEF2(50804); ARPP-19(10776); CCPG1(9236);
FLJ38723(255180); EFTUD1(79631); FLJ22795(80154); ATF71P2(80063);
MKL2(57496); IL4R(3566); CYB5B(80777); ZNRF1(84937); FLJ11151
(55313); NDUFAB1(4706); ERN2(10595); PLLP(51090); KCTD11(147040);
SARM1(23098); FLJ46247(374786); CPD(1362); NXPH3(11248); RPS6KB1
(6198); PRKCA(5578); FLCN(201163); FLJ36492(284047); ULK2(9706);
NUFIP2(57532); AP1GBP1(11276); BRCA1(672); ZNF652(22834); RECQL5
(9400); MYRA7(439921); TGIF(7050); SMAD4(4089); DOK6(220164);
DSC2(1824); PIGN(23556); PAR

TABLE 4-106

| | | |
|---|---|---|
| | | D6G(84552); ZNF333(84449); ZNF264(9422); SLC35E1(79939); |
| | | MGC2747(79086); C19orf12(83636); SNAP25(6616); LPIN3 |
| | | (64900); NCOA3(8202); RAB22A(57403); TUBB1(81027); PCMTD2 |
| | | (55251); C20orf128(128876); SPATA2(9825); HUNK(30811); |
| | | SLC5A3(6526); UBE2G2(7327); SUMO3(6612); GNAZ(2781); |
| | | APOL6(80830); SYNGR1(9145); RP5-1104E15.5(54471); TNRC6B |
| | | (23112); GAB4(128954); YPEL1(29799); DDX17(10521); CPT1B |
| | | (1375); USP9X(8239); OGT(8473); SLC16A2(6567); RP11- |
| | | 321G1.1(54885); GRIA3(2892); PRKX(5613); RGAG4(340526); |
| | | RP11-130N24.1(340533); TAF9B(51616); LAMP2(3920); ELF4 |
| | | (2000); SUHW3(55609); HS6ST2(90161); ARHGEF6(9459); |
| | | FAM11A(84548); PRKY(5616); |
| hsa-miR-550 | 134; 1536; 1537; | ZBTB8(127557); DDR2(4921); IPO9(55705); DISC1(27185); |
| | | ZAK(51776); FLJ38973(205327); THRB(7068); CD47(961); |
| | | KIAA2018(205717); FLJ35725(152992); P18SRP(285672); |
| | | SMA5(11042); PPP2CA(5515); AIM1(202); HECA(51696); |
| | | C6orf120(387263); SYNCRIP(10492); NCALD(83988); CUGBP2 |
| | | (10659); EIF4EBP2(1979); NUDT5(11164); PHCA(55331); |
| | | RIC3(79608); DYRK2(8445); GNG13(51764); C16orf28(65259); |
| | | CNP(1267); MYH10(4628); LIMD2(80774); C18orf8(29919); |
| | | SYT4(6860); SERINC3(10955); MAPK1(5594); ABCA1(19); |
| | | ADRA1A(148); ADRBK2(157); BIRC3(330); ARF6(382); STS |
| | | (412); ARSD(414); ATP1A2(477); ATP7A(538); AVPR1A(552); |
| | | BAAT(570); BAG1(573); BCAT1(586); BCL9(607); HCN2(610); |
| | | BLM(641); BPHL(670); CAPN5(726); MRPL49(740); TMEM50B |
| | | (757); CA8(767); CACNA1E(777); CAMK4(814); CASQ2(845); |
| | | RUNX1T1(862); CCNA2(890); CD3D(915); CD80(941); SEPT7 |
| | | (989); CDC27(996); CDH11(1009); CDX2(1045); CHEK1(1111); |
| | | CH13L1(1116); CHRNA4(1137); CHUK(1147); COL2A1(1280); |
| | | CPM(1368); CREBBP(1387); CRH(1392); CRHBP(1393); CRX |
| | | (1406); MAPK14(1432); CSNK1G2(1455); CSPG2(1462); CYLD |
| | | (1540); CYP1A1(1543); CYP11B1(1584); DMXL1(1657); DHFR |
| | | (1719); DLD(1738); DYNC1LI2(1783); DSC2(1824); TSC22D3 |
| | | (1831); DTNA(1837); EDA(1896); EIF5(1983); EML1(2009); |
| | | ERBB3(2065); EYA2(2139); F2R(2149); FABP4(2167); FGFR1 |
| | | (2260); MLANA(2315); FMO4(2329); AFF2(2334); FNTB(2342); |
| hsa-miR-552 | 135; | SLAMF7(57823); IPO9(55705); CYP4A11(1579); CYP20A1(57404); |
| | | OACT2(129642); DKFZp686K16132(388957); FLJ90024(129303); |
| | | ARGFX(503582); NICN1(84276); IHPK1(9807); LRRC15(131578); |
| | | WHSC1(7468); SORCS2(57537); SLC25A4(291); DCP2(167227); |
| | | PDE6A(5145); KIAA1919(91749); PHACTR2(9749); USP49(25862); |
| | | ADCY1(107); ZNFN1A1(10320); BCAP29(55973); CYCS(54205); |
| | | ALKBH4(54784); POLR2J2(246721); SPFH2(11160); ST3GAL1 |
| | | (6482); GCNT1(2650); C9orf47(286223); C9orf28(89853); |
| | | C9orf58(83543); PSMD5(5711); Cl0orf58(84293); BNIP3(664); |
| | | RBM14(10 |

TABLE 4-107

| | | |
|---|---|---|
| | | 432); Cllorf55(399879); C1RL(51279); RHOF(54509); VPS37B |
| | | (79720); FARP1(10160); TRAF3(7187); SPTLC2(9517); CEP27 |
| | | (55142); SMAD3(4088); DNAJA4(55466); SCAND2(54581); TTBK2 |
| | | (146057); FLJ22795(80154); MARVELD3(91862); TK2(7084); |
| | | CALCOCO2(10241); PRR11(55771); WDR68(10238); SSTR2(6752); |
| | | PITPNA(5306); PCGF2(7703); GJA7(10052); MBD2(8932); INSR |
| | | (3643); FBXO27(126433); OPA3(80207); HM13(81502); GGTL3 |
| | | (2686); ZHX3(23051); SIM2(6493); PKNOX1(5316); hCAP-H2 |
| | | (29781); FLJ21125(79680); MGC16703(113691); MAPK1(5594); |
| | | RP5-1119A7.4(80020); FLJ90680(400926); C22orf9(23313); |
| | | WNT7B(7477); CXorf20(139105); |
| hsa-miR-596 | 136; | C1orf93(127281); ZBTB8(127557); RBBP4(5928); PPIE(10450); |
| | | CYB561D1(284613); UCK2(7371); CACNA1E(777); PKP1(5317); |
| | | PPP1R12B(4660); PFKFB2(5208); C1orf115(79762); Clorf95 |
| | | (375057); C1orf69(200205); UBE2J2(118424); EGFL3(1953); |
| | | CHD5(26038); WASF2(10163); FLJ38984(127703); COL8A2(1296); |
| | | TNRC4(11189); KIF21B(23046); SYT2(127833); RIPK5(25778); |
| | | TMEM63A(9725); ITPKB(3707); GREM2(64388); BCL2L11(10018); |
| | | EPB41L5(57669); SFT2D3(84826); ING5(84289); FLJ21820(60526); |
| | | TSPYL6(388951); C2orf32(25927); FLJ10996(54520); WDR33(55339); |
| | | HS6ST1(9394); NR2C2(7182); CRTAP(10491); NUDT16(131870); |
| | | YEATS2(55689); CHRD(8646); LOC401052(401052); COLQ(8292); |
| | | VGLL3(389136); FSTL1(11167); RAB43(339122); MGC40579(256356); |
| | | IGF2BP2(10644); HD(3064); LETM1(3954); MXD4(10608); SCARB2 |
| | | (950); PCDHB9(56127); MYOZ3(91977); MAML1(9794); SLC12A7 |
| | | (10723); APBB3(10307); MSH5(4439); ANKS1A(23294); GLP1R |
| | | (2740); TCF21(6943); C6orfl49(57128); LEMD2(221496); TSPYL4 |
| | | (23270); OLIG3(167826); IQCE(23288); WIPI2(26100); ADAM22 |
| | | (53616); BCAP29(55973); MGC9712(202915); JAZF1(221895); |
| | | SCRN1(9805); CRHR2(1395); GRB10(2887); PHKG1(5260); CALN1 |
| | | (83698); RASA4(10156); CREB3L2(64764); KIAA0773(9715); |
| | | LOC401431(401431); DPYSL2(1808); FLJ46365(401459); LRRC14 |
| | | (9684); C8orf77(286103); LZTS1(11178); NCALD(83988); |
| | | C8orf51(78998); GDA(9615); NTRK2(4915); C9orf47(286223); |
| | | OLFML2A(169611); TOR1B(27348); C9orf7(11094); CD72(971); |
| | | SHB(6461); AKNA(80709); GBGT1(26301); BRD3(8019); PFKFB3 |
| | | (5209); CUGBP2(10659); C10orf26(54838); PDCD11(22984); |
| | | NEURL(9148); GPR26(2849); ADARB2(105); MARCH8(220972); |
| | | ERCC6(2074); LRRC20(55222); C10orf54(64115); DKFZp686O24166 |
| | | (374383); TSPAN18(90139); LRRC55(219527); SLC37A2(219855); |
| | | C11orf37(440072); APLP2(334); SCUBE2(57758); SPTY2D1(144108); |
| | | SYVN1(84447); RELA(5970); PCSK7(9159); FXYD6(53826); RBMS2 |
| | | (5939); INHBE(83729); USP30(84749); SFRS8(6433); JARID1A |
| | | (5927); SPRYD3(84 |

TABLE 4-108

| | | |
|---|---|---|
| | | 926); MMAB(326625); FAM109A(144717); SCARB1(949); |
| | | ARHGEF7(8874); GAS6(2621); FLJ25477(219287); KCTD4 |
| | | (386618); KIAA0247(9766); OTUB2(78990); KNS2(3831); |
| | | TMED8(283578); SMAD3(4088); IL16(3603); SCAND2(54581); |
| | | ALPK3(57538); ZNF710(374655); CRTC3(64784); VPS39 |
| | | (23339); RAB27A(5873); FLJ22795(80154); MAPK8IP3 |
| | | (23162); A2BP1(54715); SNN(8303); UBPH(56061); RBL2 |
| | | (5934); GNAO1(2775); NFATC3(4775); LYPLA3(23659); |
| | | HSBP1(3281); FLJ45121(400556); FLJ32252(146336); |
| | | USP31(57478); N4BP1(9683); RRAD(6236); RBM35B(80004); |
| | | C17orf81(23587); SLC2A4(6517); ARHGEF15(22899); STARD3 |
| | | (10948); MAPT(4137); NGFR(4804); CACNG1(786); CBX2 |
| | | (84733); BAIAP2(10458); FAM101B(359845); CARKL(23729); |
| | | TOM1L2(146691); ULK2(9706); TBC1D3C(414060); AP1GBP1 |
| | | (11276); TRIM25(7706); USH1G(124590); GGA3(23163); |
| | | RECQL5(9400); FLJ45079(400624); TBC1D16(125058); RFNG |
| | | (5986); SECTM1(6398); USP14(9097); SETBP1(26040); BCL2 |
| | | (596); APC2(10297); NCLN(56926); EVI5L(115704); F2RL3 |
| | | (9002); GATAD2A(64815); ITPKC(80271); ZNF155(7711); |
| | | RPL28(6158); CTXN1(404217); ELL(8178); PRX(57716); |
| | | SNPH(9751); CBFA2T2(9139); MMP24(10893); VAPB(9217); |
| | | GNAS(2778); NTSR1(4923); SRXN1(140809); NAPB(63908); |
| | | BTBD4(140685); GM632(57473); HUNK(30811); PDXK(8566); |
| | | D2132056E(8568); TMPRSS2(7113); C21orf58(54058); DGCR8 |
| | | (54487); LZTR1(8216); PPIL2(23759); NF2(4771); MGC3731 |
| | | (79159); GTPBP1(9567); MGAT3(4248); TNRC6B(23112); TEF |
| | | (7008); FBLN1(2192); DGCR2(9993); FLJ21125(79680); |
| | | KIAA1904(114794); NFAM1(150372); SPRY3(10251); ARSD |
| | | (414); TRAPPC2(6399); RGAG4(340526); |
| hsa-miR-601 | 137; 1204; | ATPIF1(93974); TXLNA(200081); AK5(26289); PRKACB(5567); |
| | | C1orF21(81563); RTKN(6242); LHFPL2(10184); GABRB2(2561); |
| | | TCF21(6943); HSPC047(29060); CLN8(2055); BNIP3L(665); CA2 |
| | | (760); NTRK2(4915); AKNA(80709); RP11-142I17.1(26095); |
| | | HPS1(3257); FLJ20489(55652); PTPN11(5781); SSH1(54434); |
| | | GPR81(27198); BCL2L2(599); DPF3(8110); GOLGA8E(390535); |
| | | GOLGA8G(283768); LOC440295(440295); GOLGA8B(440270); |
| | | ARMC5(79798); ABCC6(368); ZBTB4(57659); MXRA7(439921); |
| | | STATIP1(55250); HIF3A(64344); CRX(1406); CST9(128822); |
| | | Kua(387521); ZBTB33(10009); ABAT(18); ACADSB(36); ACCN1 |
| | | (40); ACP1(52); ALAD(210); ALDH3A1(218); ANK2(287); ARF1 |
| | | (375); ATRX(546); BAI1(575); BMPR2(659); C1QC(714); |
| | | C18orf1(753); CAMK2A(815); CAPN6(827); CAPS(828); CASP3 |
| | | (836); CBL(867); CCNG2(901); CD5L(922); CD28(940); CD80 |
| | | (941); CDX1(1044); CHI3L1(1116); CHRM2(1129); CLPTM1 |
| | | (1209); SLC31A1(1317); CR2(1380); CRY2(1408); CSNK2A2 |
| | | (1459); CTPS(1503); DAB1(1600); DNASE1L1(1774); SLC26A2 |
| | | (1836); ECM2(1842); DYRK1A(1859); E2F2(1870); EFNA3(194 |

TABLE 4-109

| | | |
|---|---|---|
| | | 4); EFNA4(1945); EPHA1(2041); EXTL3(2137); F9(2158); FDPS |
| | | (2224); FGD1(2245); FHIT(2272); FHL3(2275); FLT4(2324); |
| | | AFF2(2334); GABRE(2564); GATA4(2626); GBA(2629); GBE1 |
| | | (2632); GCK(2645); GDI2(2665); GGTL3(2686); GCLM(2730); |
| | | GLUL(2752); GMFB(2764); GNAQ(2776); GNGT2(2793); GPR12 |
| | | (2835); GRM5(2915); HLA-DOA(3111); |
| hsa-miR-608 | 138; | KCNAB2(8514); EPHA8(2046); CCDC21(64793); IGSF4B(57863); |
| | | QSCN6(5768); PPP1R12B(4660); Clorf95(375057); TNFRSF14 |
| | | (8764); RUNX3(864); Clorf91(56063); SSBP3(23648); TPM3 |
| | | (7170); MEF2D(4209); KIF21B(23046); PTPN18(26469); |
| | | IGFBP5(3488); BSN(8927); C3orf45(132228); TUSC2(11334); |
| | | SORCS2(57537); CPLX2(10814); N4BP3(23138); SLC12A7 |
| | | (10728); ZBED3(84327); C5orf20(140947); SPRY4(81848); |
| | | HDGFL1(154150); CDKN1A(1026); FOXP4(116113); TTBK1 |
| | | (84630); TMEM63B(55362); MDGA1(266727); CYP2W1(54905); |
| | | DKFZP761I2123(83637); EGFR(1956); ELN(2006); SPFH2 |
| | | (11160); LYNX1(66004); SCRT1(83482); DNAJB5(25822); |
| | | NTRK2(4915); PTGDS(5730); C9orf25(203259); ASB6(140459); |
| | | FNEP1(23048); ENTPD2(954); UNC5B(219699); LHPP(64077); |
| | | ADARB2(105); SFTPA2(6436); SH3PXD2A(9644); C11orf11(747); |
| | | SHANK2(22941); HYOU1(10525); FLJ20489(55652); NR4A1 |
| | | (3164); SLC89A5(283375); ATF7(11016); CBX5(23468); SLC7A1 |
| | | (6541); KIAA0284(283638); SLC7A8(23428); PRIMA1(145270); |
| | | ZNF609(23060); PML(5371); BMF(90427); FLJ22795(80154); |
| | | RAB40C(57799); KIAA1924(197335); GLIS2(84662); GNAO1 |
| | | (2775); CMIP(80790); TBC1D10B(26000); STX1B2(112755); |
| | | DOK4(55715); FA2H(79152); RAI1(10743); GOSR1(9527); THRA |
| | | (7067); NGFR(4804); SEPT9(10801); C1QTNF1(114897); BAIAP2 |
| | | (10458); MYBBP1A(10514); TOM1L2(146691); HCP1(113235); |
| | | GIT1(28964); TNS4(84951); PLEKHM1(9842); PPP1R9B(84687); |
| | | TBC1D16(125058); FASN(2194); MAPRE2(10982); APC2(10297); |
| | | NFIC(4782); MAP2K7(5609); NFIX(4784); BTBD14B(112939); |
| | | SAMD4B(55095); SPTBN4(57731); ARHGEF1(9138); APOE(348); |
| | | SUV420H2(84787); MKNK2(2872); TIMM13(26517); ZBTB7A(51341); |
| | | RANBP3(8498); OLFM2(93145); RAVER1(125950); ELAVL3(1995); |
| | | BRD4(23476); DMWD(1762); NTSR1(4923); ZGPAT(84619); PTPRT |
| | | (11122); PRIC285(85441); BTBD4(140685); HIC2(23119); NF2 |
| | | (4771); ZC3H7B(23284); DIP(23151); PPM1F(9647); CBX7(23492); |
| | | WNT7B(7477); SBF1(6305); OATL1(4943); TFE3(7030); IQSEC2 |
| | | (23096); |
| hsa-miR-609 | 139; 1205; | EFHD2(79180); ARID1A(8289); KIAA0467(23334); RAP1A(5906); |
| | | IGSF4B(57863); C1orf21(81563); CNTN2(6900); C1orf95(375057); |
| | | HES2(54626); REV1L(51455); RBM15B(29890); PB1(55193); MAGI1 |
| | | (9223); TMCC1(23023); KLHL5(51088); MAP1B(4131); FLJ44796 |
| | | (401209); ZNF192(7745); CSNK2B(1460); TTBK1(84630); GRI |

TABLE 4-110

| | | |
|---|---|---|
| | | K2(2898); PPP1R10(5514); UBE2D4(51619); SFRP1(6422); |
| | | ARC(23237); ALDH1B1(219); POMT1(10585); FAM69B(138311); |
| | | PTCH(5727); GRIN3A(116443); BRD3(8019); ADARB2(105); |
| | | SFMBT2(57713); FGFR2(2263); IGF2(3481); RAG2(5897); |
| | | FLJ90834(283135); SSPN(8082); DNM1L(10059); MBD6 |
| | | (114785); C12orf23(90488); BTBD11(121551); FAM101A |
| | | (144347); RAD52(5893); ZNF385(25946); GLS2(27165); |
| | | FLJ40296(122183); KBTBD7(84078); MAMDC1(161357); |
| | | FAM100A(124402); PRKCA(5578); TBCID3C(414060); MBP |
| | | (4155); SLC25A23(79085); ELAVL1(1994); HAPLN4(404037); |
| | | GGN(199720); NUMBL(9253); ZNF614(80110); LOC284296 |
| | | (284296); STK35(140901); C20orf38(55304); FOXA2(3170); |
| | | RP5-1054A22.3(85449); BTBD4(140685); DSCAM(1826); SUSD2 |
| | | (56241); FLJ21125(79680); RBM9(23548); H2AFB1(474382); |
| | | MECP2(4204); |
| hsa-miR-617 | 140; | RP4-692D3.1(80098); CYB561D1(284613); IPO9(55705); ACTN2 |
| | | (88); EGFL3(1953); KLH21(9903); EPHA10(284656); JTB |
| | | (10899); SHE(126669); PLEKHA6(22874); SOX11(6664); TTL |
| | | (150465); ReSat(54884); FLJ13984(79828); TATDN2(9797); |
| | | DLEC1(9940); C30rf37(56941); NT5DC2(64943); MGC21675 |
| | | (92070); HIP2(3093); SGCD(6444); ERGIC1(57222); SEMA5A |
| | | (9037); MCC(4163); SPOCK1(6695); PACSIN1(29993); TCF21 |
| | | (6943); C6orf47(57827); TRAM2(9697); DLD(1738); KIAA0265 |
| | | (23008); KDELR2(11014); ECOP(81552); MGC5242(78996); |
| | | ZCSHAV1(56829); SLC39A14(23516); UNC5D(137970); ZHX2 |
| | | (22882); JPH1(56704); RUNXIT1(862); LYNX1(66004); MRRF |
| | | (92399); CRB2(286204); C9orf28(89853); STKBP1(6812); |
| | | EPB41L4B(54566); FNBP1(23048); MRPL43(84545); VAX1 |
| | | (11023); ABCG4(64137); TBRG1(84897); KIAA1467(57613); |
| | | PDE3A(5139); DIP2B(57609); ACVR1B(91); RERG(85004); |
| | | LRRC10(376132); BTG1(694); HS6ST3(266722); C13orf6 |
| | | (84945); UGCGL2(55757); TRAPPC6B(122553); WARS(7453); |
| | | GREM1(26585); SMAD3(4088); NEO1(4756); PRRT2(112476); |
| | | SNTB2(6645); STX1B2(112755); TK2(7084); PRDM7(11105); |
| | | BIRC4BP(54739); CCL4L1(9560); PRKCA(5578); PITPNA |
| | | (5306); LOC201164(201164); FAM106A(80039); CCL5(6352); |
| | | FLJ45079(400624); C17orF55(284185); CEP192(55125); |
| | | SOCS6(9306); ALKBH7(84266); SYDE1(85360); ZNF480(147657); |
| | | LOC390980(390980); FLJ12949(65095); ITCH(83737); SLC2A10 |
| | | (81031); C20orf11(54994); ZGPAT(84619); ABCC13(150000); |
| | | PTTG1IP(754); NF2(4771); TNRC6B(23112); hCAP-H2(29781); |
| hsa-miR-627 | 141; 1538; | LDLRAD2(401944); C1orf83(127428); SLC30A7(148867); |
| | | C1orf27(54953); TRAF5(7188); KIAA0494(9813); SLC35D1 |
| | | (23169); PTGER3(5733); TGFBR3(7049); RORC(6097); CD84 |
| | | (8832); SYT2(127833); SOX11(6664); MGC52057(130574); |
| | | GPD2(2820); CAPN10(11132); HAAO(23498); CREG2(200407); |
| | | C2orf19(394261); NR2C2(718 |

TABLE 4-111

| | | |
|---|---|---|
| | | 2); ZNF502(91392); LIMD1(8994); HEMK1(51409); ABHD6 |
| | | (67406); ZNF654(55279); PLXNA1(5361); SKIL(6498); |
| | | FAM79B(285386); KIAA1143(57456); AMT(275); MAN2B2 |
| | | (23324); FGF5(2250); FLJ13273(79807); RGMB(285704); |
| | | SGCD(6444); SEMA5A(9037); ARL15(54622); P18SRP(285672); |
| | | SRA1(10011); DOK3(79930); HFE(3077); ZNF192(7745); |
| | | SCUBE3(222663); KIAA1900(114792); LOC619208(619208); |
| | | TBPL1(9519); WTAP(9589); RANBP9(10048); SUPT3H(8464); |
| | | BACH2(60468); PDCD2(5134); IRF5(3663); MKLN1(4289); |
| | | CALN1(83698); SULF1(23213); PAG1(55824); FBXO32(114907); |
| | | MGC21881(389741); NTRK2(4915); C9orf47(286223); NOL6 |
| | | (65083); IGFBPL1(347252); FAM78A(286336); TSC1(7248); |
| | | ARL5B(221079); EIF4EBP2(1979); VAX1(11023); TMEM86A |
| | | (144110); SLCO2B1(11309); AMOTL1(164810); SNF1LK2(23235); |
| | | TAGLN(6876); SLC1A2(6506); SUV420H1(51111); FLJ45803 |
| | | (399948); SCN3B(55800); TSPAN9(10867); TMEM16F(196527); |
| | | FLJ20489(55652); SMARCD1(6602); KIAA1853(84530); P2RX7 |
| | | (5027); VDR(7421); CBX5(23468); TMCC3(57458); FAM109A |
| | | (144717); PSEN1(5663); KCNK13(56659); BDKRB2(624); TRIM9 |
| | | (114088); SYNJ2BP(55333); TMEM62(80021); Cl5orf38(348110); |
| | | E4F1(1877); SLC7A6(9057); MAP2K4(6416); WIRE(147179); |
| | | C17orf27(57674); PLXDC1(57125); ZNF652(22834); C18orf1 |
| | | (753); FSTL3(10272); FOSB(2354); LOC147650(147650); |
| | | LILRB4(11006); ZNF264(9422); LOC390980(390980); HKR2 |
| | | (342945); CEACAM7(1087); KCNA7(3743); ATRN(8455); KIF3B |
| | | (9371); C20orf112(140688); RBM12(10137); SLC35C2(51006); |
| | | BRWD1(54014); KDELR3(11015); CTA-216E10.6(79640); |
| | | C22orf13(83606); RP11-114H20.1(401589); SRPX2(27286); |
| | | ARMCX4(158947); SPANK-N1(494118); SPANX-N5(494197); |
| hsa-miR-632 | 142; 1206; | KIF1B(23095); NPAL3(57185); KIAA1522(57648); NCEN |
| | | (23154); C1orf84(149469); C1orf83(127428); C8A(731); |
| | | KCNC4(3749); PROK1(84432); IGSF4B(57863); ATP1A2 |
| | | (477); ELF3(1999); C1orf69(200205); CSMD2(114784); |
| | | RSPO1(284654); KCNA3(3738); SLC41A1(254428); LPGAT1 |
| | | (9926); C1lorf140(400804); MAP4K4(9448); PTPN18(26469); |
| | | ASB1(51665); FARP2(9855); PREPL(9581); SERTAD2(9792); |
| | | TTN(7273); ALS2CR15(130026); TMEM43(79188); HEMK1(51409); |
| | | RBM15B(29890); ACAD9(28976); UNQ6125(442092); ST6GAL1 |
| | | (6480); UCN2(90226); RASSF1(11186); WNT5A(7474); PRICKLE2 |
| | | (166336); MASP1(5648); BCL6(604); MGC21675(92070); FRAS1 |
| | | (80144); FGF5(2250); PTPN13(5783); WWC2(80014); MXD4 |
| | | (10608); STX18(53407); MAPK10(5602); SH3RF1(57630); |
| | | ENPP6(133121); KIAA1909(153478); SUB1(10923); PCDHGB4 |
| | | (8641); CPEB4(80315); DKFZP56411171(25845); MOCS2(4338); |
| | | C5orf20(140947); SH3PXD2B(285590); DOK3(79930); C2(717); |
| | | ZDHHC14(79683); TULP4(56995); PBX2(5089); MDGA1(266727); |
| | | NXPH1( |

TABLE 4-112

| | | |
|---|---|---|
| | | 30010); ADCY1(107); LANCL2(55915); LOC441257(441257); |
| | | ADAM22(53616); ZNF12(7559); ZC3HAV1(56829); AGPAT6 |
| | | (137964); XKR5(389610); ST3GAL1(6482); NTRK2(4915); |
| | | PTGS1(5742); SEMA4D(10507); TRIM14(9830); GABBR2 |
| | | (9568); ANKS6(203286); PHF19(26147); REXO4(57109); |
| | | KIAA1274(27143); LDB3(11155); C10orf132(401647); |
| | | CNNM1(26507); ENTPD7(57089); SFMBT2(57713); SFTPA2 |
| | | (6436); COX15(1355); SH3PXD2A(9644); FAM53B(9679); |
| | | DAK(26007); CDC42EP2(10435); ZNF195(7748); SLC1A2 |
| | | (6506); SHANK2(22941); GPR83(10888); LRTM2(654429); |
| | | FKBP4(2288); TULP3(7289); TSPAN9(10867); TPI1(7167); |
| | | ETV6(2120); LOH12CR1(118426); TMTC2(160335); ATP2A2 |
| | | (488); 0AS2(4939); RBM19(9904); FLJ39378(353116); |
| | | COG3(83548); ATP11A(23250); F7(2155); C13orf1(57213); |
| | | KCTD12(115207); PPM1A(5494); JDP2(122953); TCL6 |
| | | (27004); EGLN3(112399); NIN(51199); LTBP2(4053); |
| | | PRIMA1(145270); C140rf103(55102); CDC42BPB(9578); |
| | | CPLX3(594855); ARNT2(9915); TTBK2(146057); MYEF2 |
| | | (50804); ALDH1A2(8854); RASL12(51285); NMB(4828); |
| | | AP3S2(10239); FLJ36208(283948); KIAA1924(197385); |
| | | GNPTG(84572); PDPK1(5170); FLJ14154(79903); UBPH |
| | | (56061); JMJD5(79831); CCL22(6367); COX4NB(10328); |
| | | SLC7A5(8140); KIAA0523(23302); BIRC4BP(54739); |
| | | ABCC3(8714); ACE(1636); KCNH6(81033); MGAT5B(146664); |
| | | TBCD(6904); CAMKK1(84254); CDRT4(284040); LIMD2(80774); |
| | | TMC6(11322); B3GNTL1(146712); CREB3L3(84699); FEM1A |
| | | (55527); PPAN(66342); DAND5(199699); ZNF382(84911); |
| | | MGC20255(90324); PVR(5817); APOE(348); ELAVL3(1995); |
| | | ELL(8178); ITCH(83737); CDH4(1002); C20orf11(54994); |
| | | ZGPAT(84619); CSNK2A1(1457); RP5-1022P6.2(56261); |
| | | ABCC13(150000); DYRK1A(1859); AGPAT3(56894); COL18A1 |
| | | (80781); BRWD1(54014); CRKL(1399); RAB36(9609); CABP7 |
| | | (164633); CACNA1I(8911); MAPK1(5594); MXRA5(25878); |
| | | GPR64(10149); PDZD4(57595); MECP2(4204); FAM3A(60343); |
| | | GAB3(139716); |
| hsa-miR-644 | 143; 1207; | SAMD11(148398); VWA1(64856); PIK3CD(5293); |
| | | KIAA1026(23254); SLC25A34(284723); PLA2G2F(64600); ClQB |
| | | (713); ARID1A(8289); PTPRF(5792); NHLH1(4807); ATF6 |
| | | (22926); TMCC2(9911); CCNL2(81669); ZNF436(80818); |
| | | PEF1(553115); HEYL(26508); RIMS3(9783); FOSL2(2355); |
| | | SPTBN1(6711); LOC93349(93349); FLJ34931(388939); |
| | | TGFA(7039); RAB11FIP5(26056); C2orf19(394261); KIF1A |
| | | (547); TREX1(11277); HEMK1(51409); PLXNA1(5361); |
| | | ATP11B(23200); THRB(7068); DOC1(11259); PCGF3(10336); |
| | | MGC4618(84286); RNF4(6047); SORCS2(57537); LRPAP1(4043); |
| | | AFAP(60312); ARSJ(79642); KIAA1909(163478); FBXL7(23194); |
| | | SERF1A(8293); LOC441108(441108); ERGIC1(57222); MARCH3 |
| | | (115123); TTBK1(84630); KIAA1919(91749); CLIC5(53405); |
| | | FLJ27255(4 |

TABLE 4-113

| | | |
|---|---|---|
| | | 01281); FOXK1(221937); ADCY1(107); TRRAP(8295); FLNC |
| | | (2318); TSPAN33(340348); DNAJB6(10049); NUDCD3(23386); |
| | | CALN1(83698); CDK6(1021); PODXL(5420); CHMP7(91782); |
| | | C8orf30A(51236); C9orf94(206938); SPTAN1(6709); RXRA |
| | | (6256); KCNT1(57582); PTGDS(5730); SHB(6461); PHF19 |
| | | (26147); C9orf90(203245); HSPA14(51182); EIF4EBP2 |
| | | (1979); PCDH21(92211); TLX1(3195); ADARB2(105); |
| | | DUSP13(51207); SFTPA2(6436); TMEM10(93377); MRPL43 |
| | | (84545); FAM53B(9679); Cllorf11(747); MGC33486 |
| | | (256472); TMEM16A(55107); MUCDHL(53841); TOLLIP(54472); |
| | | CD59(966); KBTBD4(55709); DDX6(1656); BCL9L(283149); |
| | | TRIM29(23650); LRTM2(654429); OAS3(4940); FAIM2(23017); |
| | | CTDSP2(10106); FLJ22471(80212); ATP11A(23250); BDKRB2 |
| | | (624); SLC8A3(6547); ITPK1(3705); KLF13(51621); CHP |
| | | (11261); GLDN(342035); ARID3B(10620); ARNT2(9915); |
| | | ABHD2(11057); MAN2A2(4122); ELL3(80237); RGMA(56963); |
| | | C16orf33(79622); MMP25(64386); KIAA0350(23274); SNN |
| | | (8303); SBK1(388228); NFAT5(10725); WWP2(11060); |
| | | KIAA0513(9764); SEPX1(51734); XYLT1(64131); MGC4655 |
| | | (84752); FBXO31(79791); TIMM22(29928); TUSC5(286753); |
| | | LLGL2(3993); C17orf27(57674); TOM1L2(146691); MGC23280 |
| | | (147015); CCL3L3(414062); TRIM25(7706); TBC1D16 |
| | | (125058); FLJ46026(400627); Cl7orf70(80233); PCYT2 |
| | | (5833); P15RS(55197); ST8SIA5(29906); SPPL2B(56928); |
| | | HMG20B(10362); CC2D1A(54862); RAB8A(4218); APOE(348); |
| | | HIF3A(64344); ZNF264(9422); PIP5K1C(23396); SIRT6 |
| | | (51548); MYLK2(85366); PPP1R16B(26051); C2Oorf112 |
| | | (140688); PTPRT(11122); PTGIS(5740); C20orf175 |
| | | (140876); DIDO1(11083); IFNAR1(3454); PDXK(8566); |
| | | AGPAT3(56894); COL6A2(1292); C21orf24(400866); |
| | | PLAC4(191585); LZTR1(8216); MICAL-L1(85377); |
| | | PPARA(5465); C22orf5(25829); CELSR1(9620); |
| | | ARHGAP6(395); RGAG4(340526); DNASE1L1(1774); |
| hsa-miR-659 | 144; | EPHB2(2048); LDLRAP1(26119); MTB8(127557); |
| | | C1orf83(127428); ZNF326(284695); GPR88(54112); CGN |
| | | (57530); EYA3(2140); KIAA0319L(79932); HPCAL4(51440); |
| | | DEPDC1(55635); NBPF4(148545); NOTCH2(4853); B3GALNT2 |
| | | (148789); ZNF670(93474); CCNT2(905); SLC39A10(57181); |
| | | FEZ2(9637); MGAT4A(11320); ORC4L(5000); GPR155(151556); |
| | | THRB(7068); FYCO1(79443); FOXP1(27086); RYBP(23429); |
| | | TMCC1(23023); FGF12(2257); KIAA1727(85462); FLJ323235 |
| | | (80008); UGDH(7358); ADAMTS3(9508); MARCH1(55016); |
| | | MFAP3L(9848); FAM105B(90268); PRLR(5618); RICTOR |
| | | (253260); AFF4(27125); SAR1B(51128); HECA(51696); |
| | | C6orf105(84830); MOCS1(4337); CLIC5(53405); SLC17A5 |
| | | (26503); PLEKHA8(84725); LIMK1(3984); SCRN1(9805); |
| | | ZNF704(619279); GDF6(392255); NTRK2(4915); C9orf47 |
| | | (286223); SLC31A1(1317); CORO2A(7464); TXNDC4(23071); |
| | | VPS26A(9559); ENTPD7(57089); FA |

TABLE 4-114

| | | |
|---|---|---|
| | | M107(83641); POLR3A(11128); TMEM10(93377); PIK3AP1 |
| | | (118788); RAB11FIP2(22841); NAV2(89797); RAB6IP2(23085); |
| | | KLHDC5(57542); HOXC12(3228); MDM2(4193); SOCS2(8835); |
| | | LNK(10019); GRIN2B(2904); KL(9365); HS6ST3(266722); BIVM |
| | | (54841); C13orf1(57213); SLC39A9(55334); KIAA1443(57594); |
| | | SPTLC2(9517); DIO2(1734); GPR68(8111); SEMA6D(80031); |
| | | SMAD3(4088); ZSCAN2(54993); MTMR10(54893); FLJ38723 |
| | | (255180); FLJ22795(80154); MKL2(57496); CORO1A(11151); |
| | | ZPBP2(124626); C18orf1(753); C18orf16(147429); DTNA(1837); |
| | | ZNF480(147667); PTPNS1(140885); CBFA2T2(9139); TP531NP2 |
| | | (58476); PTPRT(11122); B4GALT5(9334); ZNF295(49854); APOL6 |
| | | (80830); SYNGR1(9145); CLCN4(1183); FRMPD4(9758); PCDH11X |
| | | (27328); CHM(1121); SUHW3(55609); PCDH11Y(83259); |
| hsa-miR-769-5p | 145; | SAMD11(148398); ZBTB40(9923); CCDC21(64793); PTPRU |
| | | (10076); C1orf84(149489); C1orf83(127428); SLC35A3(28443); |
| | | ANXA9(8416); NAV1(89796); PRELP(5549); LYPLAL1(127018); |
| | | MELL1(79258); RCC2(55920); ST7L(54879); LYST(1130); AKT3 |
| | | (10000); LPIN1(23175); LBH(81606); NRP2(8828); ADCY3(109); |
| | | DAG1(1605); NUDT16(131870); CLDN18(51208); ZNF445(353274); |
| | | VGLL3(389136); MUC4(4585); WHSC1(7468); SOD3(6649); SLC34A2 |
| | | (10568); EREG(2069); KIAA1909(153478); R7BP(401190); GRAMD3 |
| | | (65983); PSD2(84249); PRO1580(55374); SAR1B(51128); LRRTM2 |
| | | (26045); GRM6(2916); ZDHHC14(79683); MDGA1(266727); EPM2A |
| | | (7957); TRRAP(8295); RBM33(155435); CALN1(83898); IMPDH1 |
| | | (3614); SCARA3(51435); UNC5D(137970); ATP6V1C1(528); RHPN1 |
| | | (114822); ZNF623(9831); BIN3(55909); ZNF395(55893); CPSF1 |
| | | (29894); NTRK2(4915); C9orf47(286223); SYK(6850); SET |
| | | (6418); COL5A1(1289); ASB6(140459); ABO(28); SFTPA1(6435); |
| | | HIF1AN(55662); C10orf10(11067); MARCH8(220972); KCNMA1 |
| | | (3778); SFTPA2(6436); HTR7(3363); FAM26C(255022); COL17A1 |
| | | (1308); VAX1(11023); ADRBK1(156); CUL5(8065); TMPRSS4 |
| | | (56649); SHANK2(22941); PGM2L1(283209); FGD4(121512); |
| | | DIP2B(57609); TCF1(6927); FMNL3(91010); DDIT3(1849); |
| | | NT5DC3(51559); KLF12(11278); KCTD12(115207); COQ6(51004); |
| | | C14orf43(91748); SPTLC2(9517); PML(5371); LRRK1(79705); |
| | | FLJ22795(80154); TBL3(10607); KIAA0350(23274); TFAP4(7023); |
| | | ERN2(10595); EME1(146956); AMZ2(51321); SLC25A35(399512); |
| | | FAM106A(80039); FLJ31952(146857); HELZ(9931); TBC1D16 |
| | | (125058); PDE6G(5148); MAFG(4097); C17orf62(79415); ZADH2 |
| | | (284273); LOC388503(388503); FLJ45910(388512); APOE(348); |
| | | LOC390980(390980); ZNF549(256051); ZNF561(93134); PRX |
| | | (57716); SLC8A2(6543); ZNF665(79788); CDS2(8760); |
| | | PPP1R16B(26051); PARD6B(84612); ADARB1(104); DGCR14 |
| | | (8220); MAPK1(5594); RP11-321G1.1(54885); TFE3(703 |

TABLE 4-115

| | | |
|---|---|---|
| | | 0); RGAG4(340526); RP11-130N24.1(340533); |
| hsa-miR-801 | 146; | DMRTB1(63948); PTGFRN(5738); PAPPA2(60676); CACNA1E(777); |
| | | RP1-286D6.4(9731); HEYL(26508); GBP3(2635); AMIGO1(57463); |
| | | SLC41A1(254428); SEL1(85465); TGFA(7039); NEUROD1(4760); |
| | | PAX3(5077); ITGA9(3680); BPESC1(60467); CCDC50(152137); |
| | | SATB1(6304); FYCO1(79443); RAB6B(51560); GP5(2814); TMPRSS11E |
| | | (28983); MAPK10(5602); PHF15(23338); PCDHB13(56123); ITK |
| | | (3702); PCSK1(5122); REEP5(7905); RAPGEF6(51735); DST(667); |
| | | VNN1(8876); PURB(5814); ADAM9(8754); PMP2(5375); STRBP |
| | | (55342); SFTPA1(6435); GPR26(2849); IDE(3416); EHF(26298); |
| | | SNF1LK2(23235); TAGLN(6876); ARHGAP20(57569); TULP3(7289); |
| | | PTPRO(5800); SUDS3(64426); FLJ40296(122183); KCTD12(115207); |
| | | NDNL2(56160); CSNK1G1(53944); HSPC105(93517); NCOA3(8202); |
| | | DPM1(8813); JAM2(58494); SYNJ1(8867); LOC128977(128977); |
| | | MAPK1(5594); CXorf39(139231); |
| hsa-miR-365 | 147; 1208; 1209; 1210; | VWAI(64856); CLCN6(1185); Clorf37(92703); BTG2(7832); |
| | 1211; 1212; 1213; 1214; | DISC1(27185); MTR(4548); IL28RA(163702); KIAA0319L |
| | 1215; 1216; 1217; 1218; | (79932); MYCBP(26292); PIK3R3(8503); ZBTB41(360023); |
| | | PLEKHA6(22874); LPGAT1(9926); ENAH(55740); AKT3(10000); |
| | | DNAJC10(54431); IL1A(3652); ACVR1(90); SESTD1(91404); |
| | | USP37(57695);SLC6A6(6533); NR1D2(9975); LIMD1(8994); |
| | | KALRN(8997); IL1RAP(3556); VGLL3(389136); DHFRL1(200895); |
| | | ZNF148(7707); FRAS1(80144); C4orf12(404201); ASAHL(27163); |
| | | FLJ23191(79625); NR3C2(4306); FIS(202299); DCP2(167227); |
| | | N4BP3(23138); HMGOS1(3157); PDE4D(5144); DHFR(1719); |
| | | STARD4(134429); KIAA0240(23506); PKHD1(5314); ADCY1(107); |
| | | LUC7L2(51631); HOXA9(3205); ZNF680(340252); PMS2L2(5380); |
| | | CDK6(1021); TMEM130(222865); ZC3HAV1(56829); BMP1(649); |
| | | UNC5D(137970); C8orf1(734); ZNF483(158399); ZDHHC21 |
| | | (340481); PSIP1(11168); KIAA0367(23273); ANKS6(203286); |
| | | AKNA(80709); FAM78A(286336); GTPBP4(23560); SFTPA1(6435); |
| | | TSPAN14(81619); SUFU(51684); ARHGAP12(94134); ASAH2(56624); |
| | | C10orf54(64115); SFTPA2(6436); DKFZp686O24166(374383); |
| | | MYEOV(26579); MS4A6A(64231); MTMR2(8898); PRDM10(56980); |
| | | B4GALNT3(283358); LRTM2(654429); GDF11(10220); KIAA0152 |
| | | (9761); GPR92(57121); ASB8(140461); ARF3(377); CBX5 |
| | | (23468); GALNT4(8693); XPO4(64328); SLC7A1(6541); NFATC4 |
| | | (4776); KIAA0391(9692); KNS2(3831); TM9SF1(10548); |
| | | ZDHHC22(283576); ALPK3(57538); CDAN1(146059); CRAMP1L |
| | | (57585); GPR97(222487); ZNRF1(84937); C16orf5(29965); GOSR1 |
| | | (9527); TADA2L(6871); WDR68(10238); FOXK2(3607); NUFIP2 |
| | | (57532); TCF2(6928);DTNA(1837); RNF152(220441); PSMD8(5714); |
| | | PLAC2(257000); PYGB(5834); RAB22A(57403); FLJ13149(60493); |
| | | HUNK(30811); FLJ41733(400870); APOL6(80830); ZNF |

TABLE 4-116

| | | |
|---|---|---|
| | | 70(7621); LAMP2(3920); MECP2(4204); |
| hsa-miR-142-3p | 148; 1219; 1220; 1221; | FLVCR(28982); PROX1(5629); TTMB(399474); SSX2IP |
| | 3496; 1222; 1223; 3497; | (117178); DENND2D(79961); ZBTB41(360023); EML4 |
| | | (27436); DLEC1(9940); LOC92689(92689); SMR3A |
| | | (26952); GAB1(2549); TKTL2(84076); RHOBTB3(22836); |
| | | PRLR(5618); RICTOR(253260); FAM44B(91272); SLC35A1 |
| | | (10559); QKI(9444); CREB5(9586); HIP1(3092); WASL |
| | | (8976); SLC37A3(84255); MTMR9(66036); NTRK2(4915); |
| | | PALM2(114299); BNC2(54796); TRIM14(9830); ARID5B |
| | | (84159); MLR2(84458); RAB11FIP2(22841); TEAD1(7003); |
| | | ARNTL(406); TBRG1(84897); GRM5(2915); HMGA2(8091); |
| | | FGF23(8074); SLC38A1(81589); SLC38A4(55089); NT5DC3 |
| | | (51559); ZNF605(90462); TSHR(7253); FLJ11506(79719); |
| | | TNFRSF11A(8792); P15RS(55197); AKT1S1(84335); DUXA |
| | | (503835); PRKCBP1(23613); DSCR6(53820); BRWD1(54014); |
| | | SNF1LK(150094); CA5B(11238); AFF2(2334); SPRY3(10251); |
| | | WNK3(65267); TWSG1(57045); MXRA7(439921); PTGIS(5740); |
| | | ANKRD11(29123); BACH1(571); ATF7IP(55729); ITGAV(3685); |
| | | LASS6(253782); ALOX15(246); PROM1(8842); FAM102B(284611); |
| | | CHM(1121); CCDC6(8030); ARL1(400); STRN3(29966); DYNC1LI2 |
| | | (1783); C9orf72(203228); KRT10(3858); SLC35F5(80255); |
| | | PSIP1(11168); MTCH1(23787); DIRC2(84925); EGR2(1959); |
| | | TCEB3(6924); MON2(23041); ARL8B(55207); HGS(9146);MTHFR |
| | | (4524); TMEM34(55751); ARHGEF12(23365); C22orf15(150248); |
| | | RNF7(9616); PREI3(25843); SIRT3(23410); STAU1(6780);ARF4 |
| | | (378); CCNJ(54619); PCTP(58488); C11orf54(28970); MMAB |
| | | (326625); RHEB(6009); PPP1R2(5504); SPRED1(161742); |
| | | RPS6KA3(6197); SKP1A(6500); SECISBP2(79048); SOCS6(9306); |
| | | KIAA1715(80856); HECTD1(25831); KIAA1191(57179); SLC25A22 |
| | | (79751); DNAJB4(11080); HBS1L(10767); RAC1(5879); FBXO21 |
| | | (23014); CFL2(1073); PLEKHA3(65977); PCGF3(10336); |
| | | C10orf118(55088); APC(324); GNAQ(2776); BTBD7(55727); |
| | | USH1C(10083); GTF2A1(2957); CASP8(841); C6orf152(167691); |
| | | FHIT(2272); SLC30A6(55676); PCMTD2(55251); SPATA18(132671); |
| | | TCF7(6932); C10orf119(79892); SPATA6(54558); LGR4(55366); |
| | | FNBP1L(54874); CRTAM(56253); C14orf24(283635); ZNF558 |
| | | (148156); ME1(4199); TBL1X(6907); FNDC3A(22862); DPYSL2 |
| | | (1808); KIAA0367(23273); PIGA(5277); MKLN1(4289); SLC13A3 |
| | | (64849); MAP3K7IP2(23118); SETBP1(26040); ZNF395(55893); |
| | | SLCO4C1(353189); GABRG2(2566); CLUAP1(23059); GPRC5A(9052); |
| | | GRHL1(29841); PSMB5(5693); PCSK1(5122); ZCCHC14(23174); |
| | | DKFZP686I15217(401232); NSFL1C(55968); ST6GAL2(84620); |
| | | TMTC1(83857); ADAMTS3(9508); UTX(7403); NAGS(162417); |
| | | HNRPDL(9987); DIP2A(23181); CTTN(2017); CDADC1(81602); |
| | | ATP6V1A(523); RAPH1(65059); PCAF(8850); COPS7A(50813); |
| | | SERP1(27230); ATG5(9474); TBC1D8(1 |

TABLE 4-117

| | | |
|---|---|---|
| | | 1138); TSPYL1(7259); NUDT11(55190); C8orf77(286103); |
| | | RAB39(54734); SLC7A11(23657); SYPL1(6856); ZNF547 |
| | | (284306); RBM16(22828); CDK5R1(8851); NUCKS1(64710); |
| | | VAMP3(9341); OSBPL8(114882); FOXD4(2298); ATP2A2(488); |
| | | RNF141(50862); NHLRC2(374354); C16orf28(65259); ZNF367 |
| | | (195828); KDELR2(11014); CDC34(997); C9orf5(23731); |
| | | CUL5(8065); ATP1B1(481); EPM2AIP1(9852); RRM2B(50484); |
| | | CALCOCO2(10241); HMGB1(3146); TSEN34(79042); TUBB2A |
| | | (7280); EEF2K(29904); DMXL2(23312); DCUN1D4(23142); |
| | | AMZ2(51321); KLHDC6(166348); CLIC4(25932); MAP4K3 |
| | | (8491); EVA1(10205); ARL2(402); C1orf9(51430); CTNND1 |
| | | (1500); PFKM(5213); TGFBR1(7046); DEPDC1(55635); |
| | | TARDBP(23435); SCAMP1(9522); CD84(8832); C4orf15(79441); |
| | | PTPN23(25930); ADCY9(115); SGEF(26084); B3GNT1(11041); |
| | | FKBP1A(2280); Cl7orf63(55731); SPIN1(10927); USP9X |
| | | (8239); BDH2(56898); BCLAF1(9774); LRRC32(2615); RAB4OB |
| | | (10966); FZD7(8324); CRK(1398); C1orf107(27042); |
| | | MRPL30(51263); TTBK2(146057); IL7R(3575); RBM47(54502); |
| | | STAM2(10254); RUNDC1(146923); LYCAT(253558); CCNT2(905); |
| | | MYRIP(25924); FAM19A2(338811); RLF(6018); ZNF641(121274); |
| | | CDCP1(64866); SLC30A9(10463); SSPN(8082); OXR1(55074); |
| hsa-miR-200a | 149; 1224; 1225; 1226; | CLCN6(1185); PRKACB(5567); HS2ST1(9653); LY9(4063); |
| | 1227; 1228; 1229; 1230; | RALGPS2(55103); Clorf21(81563); PPP1R12B(4660); Clorf69 |
| | 1231; 1232; 1233; 1539; | (200205); SLC35D1(23169); SYT6(148281); SELE(6401); |
| | 1540; 1541; 1542; 1543; | ARPC5(10092); SLC30A1(7779); PCNXL2(80003); SELI(85465); |
| | | LOC339745(339745); MGC52057(130574); ITGA6(3655); ZAK |
| | | (51776); SLC39A10(57181); RPE(6120); HRB(3267); WDR33 |
| | | (55339); ZFHX1B(9839); CUL3(8452); EDEM1(9695); NR2C2 |
| | | (7182); ZNF660(285349); C3orf14(57415); PPM1L(151742); |
| | | CD47(961); WHSC1(7468); PDGFRA(5156); LETM1(3954); ATP8A1 |
| | | (10396); TNPO1(3842); DCP2(167227); SLC26A2(1636); SEMA6A |
| | | (57556); C6orf69(222658); KIAA1244(57221); ATXN1(6310); |
| | | ITGB8(3696); EGFR(1956); VKORC1L1(154807); MDFIC(29969); |
| | | RBM33(155435); YWHAG(7532); AGPAT6(137964); C8orf1(734); |
| | | PLAG1(5324); MMP16(4325); RANBP6(26953); FBXW2(26190); |
| | | TSC1(7248); TCF8(6935); ENTPD7(57089); NEURL(9148); |
| | | LRRC27(80313); ZNF248(57209); COX15(1355); STS-1(84959); |
| | | DIP2B(57609); BRI3BP(140707); LMO3(55885); SLC38A1(81539); |
| | | FKBP11(51303); CBX5(23468); ATP8A2(51761); AKAP11(11215); |
| | | HS6ST3(266722); KLF12(11278); PSEN1(5683); EXOC5(10640); |
| | | CHES1(1112); PAQR5(54852); UBE3A(7337); PRKCB1(5579); CHD9 |
| | | (80205); CMTM4(146223); PPM1E(22843); PITPNA(5306); GJA7 |
| | | (10052); NPTX1(4884); C18orfl(753); MIB1(57534); ZNF24 |
| | | (7572); CSPG3(1463); LENG8(114823); PRND(23627); IFNAR1 |
| | | (3454); SLC5A3(6526); TNRC6B(23112); PPARA(5465); MAPK |

TABLE 4-118

| | | |
|---|---|---|
| | | 1(5594); PGK1(5230); DDX26B(203522); AFF2(2334); |
| | | RP6-166C19.1(255313); MECP2(4204); |
| hsa-miR-361 | 150; 1234; 1235; 3498; | ZBTB40(9923); ZBTB8(127557); ZYG11B(79699); ST6GALNAC5 |
| | 1236; 1237; | (81849); HS2ST1(9653); TMEM56(148534); CDC14A(8556); |
| | | DDR2(4921); IPO9(55705); PPP1R12B(4660); TRIM58(25893); |
| | | CNR2(1269); TTMB(399474); FMO5(2330); WDR26(80232);TAF5L |
| | | (27097); SOX11(6664); SPTBN1(6711); FLJ13910(64795); ACTR3 |
| | | (10096); KCNJ3(3760); CASP10(843); C2orf3(6936); TGOLN2 |
| | | (10618); MGAT4A(11320); TSGA10(80705); ST6GAL2(84620); |
| | | KIAA1189(57471); GALNT3(2591); FLJ13946(92104); PGAP1 |
| | | (80055); HEMK1(51409); IGSF4D(253559); NAALADL2(254827); |
| | | FYTTD1(84248); CRBN(51185); CX3CR1(1524); PRICKLE2(166336); |
| | | MAGI1(9223); LMOD3(56203); GCET2(257144); C3orf17(25871); |
| | | 0SBPL11(114885); SERP1(27230); GNB4(59345); WHSC1(7468); |
| | | RNF4(6047); AFF1(4299); UGT8(7368); UBE1L2(55236); MAML3 |
| | | (55534); FLJ11193(55322); IL7R(3575); SLC1A3(6507); |
| | | LOC285636(285636); FLJ33641(202309); MAP1B(4131); CAMK4 |
| | | (814); MFAP3(4238); RANBP17(64901); ELOVL7(79993); MTX3 |
| | | (345778); AFF4(27125); LOC221711(221711); MRS2L(57380); |
| | | SH3BGRL2(83699); CCR6(1235); PGM3(5238); CDC2L6(23097); |
| | | STX7(8417); HBS1L(10767); PERP(64065); PDE10A(10846); |
| | | TMEM106B(54664); HDAC9(9734); CREB5(9686); STEAP2(261729); |
| | | DKFZP686A10121(85865); ZNF655(79027); MET(4233); PODXL |
| | | (5420); FLJ12700(79970); LMBR1(64327); UBE2V2(7336); SDCBP |
| | | (6386); DPY19L4(286148); VPS13B(157680); CSMD1(64478); |
| | | TEX15(56154); RBM12B(389677); FAM49B(51571); C9orf150 |
| | | (286343); RAD23B(5887); ZBTB5(9925); OGN(4969); ZNF510 |
| | | (22869); C9orf97(158427); WDR31(114987); TSC1(7248); |
| | | TCF8(6935); CXXC6(80312); PCGF5(84333); ACADSB(36); ZRANB1 |
| | | (54764); LRRC27(80313); C10orf97(80013); C10orf72(196740); |
| | | HERC4(26091); GRID1(2894); RAB11FIP2(22841); IPO7(10527); |
| | | USP47(55031); Cllorf44(283171); HBXAP(51773); JOSD3(79101); |
| | | AEBP2(121536); PDE3A(5139); NUDT4(11163); CHST11(50515); |
| | | ATP6V0A2(23545); BRI3BP(140707); SYT10(341359); SLC5A8 |
| | | (160728); C12orf30(80018); LOC400120(400120); FLJ40919 |
| | | (144809); C13orf23(80209); FLJ10154(55082); GPHN(10243); |
| | | FLRT2(23768); STXBP6(29091); NIN(51199); RDH11(51109); |
| | | SEL1L(6400); MTAC2D1(123036); SPRED1(161742); CCNDBP1 |
| | | (23582); Gcom1(145781); SNX1(6642); KIAA1024(23251); |
| | | CSNK1G1(53944); PRKCB1(5579); NFAT5(10725); DYNC1LI2(1783); |
| | | G6PC(2538); TMEM106A(113277); CROP(51747); TSR1(55720); |
| | | LOC220594(220594); NUFIP2(57532); APPBP2(10513); GNA13 |
| | | (10672); HELZ(9931); ACTG1(71); SMAD2(4087); C18orf4(92126); |
| | | ZNF507(22847); DMRTC2(63946); ZNF264(9422); ZNF17(7565); |
| | | ZNF571 |

TABLE 4-119

| | | (51276); CARD8(22900); CBFA2T2(9139); VAPB(9217); C20orf177 |
|---|---|---|
| | | (63939); NANP(140838); NDRG3(57446); SLC5A3(6526); ADAMTS5 |
| | | (11096); APOL6(80830); ZXDB(158586); AGTR2(186); IL13RA1 |
| | | (3597); RP3-473B4.1(159091); SPRY3(10251); |
| hsa-miR-29a | 3372; 3499; 3500; 3501; | CDC7(8317); VANGL1(81839); NAV1(89796); IPO9(55705); |
| hsa-miR-29b | 3502; 3503; 3504; 3505; | RNASEL(6041); LOC92691(92691); MOBK1B(55233); WDR33(55339); |
| | 3506; 3507; 3508; 3509; | COL4A4(1286); DLEC1(9940); WHSC1(7468); NR3C1(2908); |
| | 3510; 3511; 3512; 3513; | ADAMTS2(9509); SLC22A7(10864); ELN(2006); SNX8(29886); |
| | 3514; 3515; 3516; 3517; | PI15(51050); COL5A1(1289); CXXC6(80312); ClOorf67(256815); |
| | 3518; 3519; 3520; 3521; | ClOorf55(414236); SH3PXD2A(9644); TDG(6996); CLEC7A(64581); |
| | 3522; 3523; 3524; 3525; | CBX5(23468); HRK(8739); RAB15(376267); DIO2(1734); BCL11B |
| | 3526; 3527; 3528; 3529; | (64919); TMEM62(80021); KIAA1024(23251); RAB40C(57799); |
| | 3530; 3531; 3532; 3533; | NDRG4(65009); HAS3(3038); ZNF276(92822); MAFG(4097); DOT1L |
| | 3534; 3535; 3536; 3373; | (84444); COL5A3(50509); LENG9(94059); SEPT5(5413); |
| | | FLJ21125(79680); ARVCF(421); C1QTNF6(114904); POLR3H(171568); |
| | | DCX(1641); AP1G1(164); AKT2(208); ANXA5(308); APOE(348); |
| | | APXL(357); ARF3(377); BDH1(622); CEACAM1(634); CACNA1C(775); |
| | | CAMK2G(818); RUNX1T1(862); CCND2(894); CD59(966); CDC42 |
| | | (998); CDK6(1021); CHKB(1120); COL3A1(1281); COL4A3(1285); |
| | | COL7A1(1294); COL11A1(1301); COLl9A1(1310); SLC31A1(1317); |
| | | CPM(1368); CSNK2B(1460); CSPG4(1464); DAG1(1605); ACE(1636); |
| | | DIAPH2(1730); DLG2(1740); DNMT3A(1788); DSC2(1824); DSG3 |
| | | (1830); DVL1(1855); E4F1(1877); EPB41L1(2036); EREG(2069); |
| | | FBN1(2200); GNS(2799); GTF3C1(2975); HTR6(3362); IGF1(3479); |
| | | ITPK1(3705); LAMC2(3918); LEP(3952); LOX(4015); LRPAP1 |
| | | (4043); MXD1(4084); MAT1A(4143); MFAP2(4237); MRE11A(4361); |
| | | TRIM37(4591); NASP(4678); CEACAM6(4680); NFIA(4774); NFATC3 |
| hsa-miR-30a-5p | 3374; 3537; 3538; 3539; | (4775); S100PBP(64766); PRKAA2(5563); PTGFRN(5738); ZBTB41 |
| hsa-miR-30b | 3540; 3541; 3542; 3543; | (360023); TMEM87B(84910); SCN2A2(6326); USP37(57695); TRNT1 |
| | 3544; 3545; 3646; 3547; | (51095); B3GNT5(84002); CELSR3(1951); GCET2(257144); CD80 |
| | 3548; 3549; 3550; 3551; | (941); STOX2(56977); OTUD4(54726); SLC36A1(206358); PRLR |
| | 3552; 3553; 3554; 3555; | (5618); DKFZP781I1119(166968); ANKRA2(57763); RUNX2(860); |
| | 3556; 3557; 3558; 3559; | LIN28B(389421); HDAC9(9734); PHTF2(57157); ANKRD20A2 |
| | 3560; 3561; 3562; 3563; | (441430); ANKRD20A1(84210); ANKRD20A3(441425); KIAA0367 |
| | 3564; 3565; 3566; 3567; | (23273); REEP3(221035); RP11-142I17.1(26095); PLEKHK1 |
| | 3568; 3569; 3570; 3571; | (219790); PAFAH1B2(5049); SLC36A4(120103); RIMBP2(23504); |
| | 3572; 3573; 3574; 3575; | MKRN3(7681); FAM81A(145773); CCPG1(9236); NEDD4(4734); |
| | 3576; 3577; 3578; 3579; | FAHD1(81889); TNRC6A(27327); NFAT5(10725); USP14(9097); |
| | 3580; 3581; 3582; 3583; | WDR7(23335); STK35(140901); C20orf91(284800); PCMTD2 |
| | 3584; 3585; 3586; 3587; | (55251); RBM12(10137); SLC5A3(6526); BRWD1(54014); STS |
| | 3588; 3589; 3590; 3591; | (412); CNKSR2(22866); ABR(29); ADRB1(153); AK2(204); |
| | 3592; 3593; 3594; 3595; | APBA1(320); RHOB(388); ATP6V1B2(526); BCL9(607); BNIP3L |
| | 3596; 3597; 3698; 3599; | (665); KLF9(687); CALU(813); |
| | 3600; 3375; 3689; 3690; | |

TABLE 4-120

| | | |
|---|---|---|
| | | RUNX1(861); CFL2(1073); CHD1(1105); COL19A1(1310); |
| | | DPYSL2(1808); DSG2(1829); CLN8(2055); ETF1(2107); EXTL2 |
| | | (2135); F12(2161); FOXG1B(2290); FOSL2(2355); NR5A2(2494); |
| | | GABRB1(2560); GLI2(2736); GM2A(2760); GNAI2(2771); GNAQ |
| | | (2776); GRM5(2915); HD(3064); HNF4G(3174); INPP4A(3631); |
| | | KPNA3(3889); AFF3(3899); LIFR(3977); LIMS1(3987); MAP6 |
| | | (4135); ME1(4199); CD99(4267); MLL(4297); MYH11(4629); |
| | | PPP1R12B(4660); NAP1L1(4673); NCAM1(4684); NKTR(4820); |
| | | NOV(4856); NT5E(4907); PDE4D(5144); PDE7A(5150); PGM3 |
| | | (5238); PIGA(5277); |
| hsa-miR-105 | 3376; 3601; 3602; 3603; | EIF2C1(26523); Clorf121(51029); AFF3(3899); PIK3CA(5290); |
| | 3604; 3605; 3606; 3607; | PRICKLE2(166336); VGLL3(389136); TBL1XR1(79718); KLHL3 |
| | 3608; 3609; 3610; | (26249); TULP4(56995); F13A1(2162); PKHD1(5314); PGM3 |
| | | (5238); ZNRF2(223082); LOC441257(441257); FLJ44060(346288); |
| | | PMS2L2(5380); CDK6(1021); SFRP1(6422); NTRK2(4915); PCDH21 |
| | | (92211); ENTPD7(57089); Cl0orf6(55719); TMEM26(219623); |
| | | LDLRAD3(143458); TMEM132B(114795); CBX5(23468); PHLDA1 |
| | | (22822); IGF1(3479); SLC41A2(84102); RIMBP2(23504); ARHGEF7 |
| | | (8874); FLRT2(23768); SEL1L(6400); RNF111(54778); SMAD3 |
| | | (4088); TJP1(7082); AVEN(57099); SUHW4(54816); CRAMP1L |
| | | (57585); PRO0149(29035); PDPR(55066); CMTM4(146223); ST8SIA3 |
| | | (51046); NFATC1(4772); OR7D2(162998); DPY19L3(147991); PEPD |
| | | (5184); SLC24A3(57419); RAB22A(57403); COL9A3(1299); MAPK1 |
| | | (5594); |
| hsa-miR-124a | 3377; 3611; 3612; 3613; | KIF1B(23095); RAVER2(55225); FNBP1L(54874); AGL(178); |
| | 3614; 3615; 3616; 3617; | HIPK1(204851); VANGL1(81839); RAG1AP1(55974); PEA15 |
| | 3618; 3619; 3620; 3621; | (8682); PRRX1(5396); RALGPS2(55103); Clorf21(81563); |
| | 3622; 3623; | NR5A2(2494); CAPN9(10753); MYCBP(26292); TGFBR3 |
| | | (7049); F11R(50848); TEDDM1(127670); KCNT2(343450); NID1 |
| | | (4811); LPIN1(23175); SEL1(85465); LYCAT(253558); RHOQ |
| | | (23433); SPTBN1(6711); C2orf13(200558); RPIA(22934); |
| | | SFT2D3(84826); CCNT2(905); RIF1(55183); GALNT13(114805); |
| | | NRP2(8828); OACT2(129642); RAB1A(5861); LMAN2L(81562); |
| | | SEPT10(151011); NPHP1(4867); WDR33(55339); CACNB4(786); |
| | | TRIP12(9320); EDEM1(9695); OKNAD1(92106); CTDSPL(10217); |
| | | HEMK1(51409); RBM15B(29890); MITF(4286); NFKBIZ(64332); |
| | | GTF2E1(2960); SUCNR1(56670); RAP2B(5912); KLHL24(54800); |
| | | LPP(4026); TBC1D5(9779); THRB(7068); IL17RD(54756); MINA |
| | | (84864); PLSCR4(57088); PI4K2B(55300); DKFZP686AO1247 |
| | | (22998); PDLIM5(10611); CYP2U1(113612); TLL1(7092); |
| | | PALLD(23022); FLJ20273(54502); CCDC4(389206); TEC(7006); |
| | | ANTXR2(118429); FAM13A1(10144); OTUD4(54726); C4orf13 |
| | | (84068); NR3C2(4306); RWDD4A(201965); ACSL1(2180); CCT5 |
| | | (22948); KIF2(3796); POLR3G(10622); PURA(5813); ATP6V0E( |

TABLE 4-121

| | | 8992); FLJ33360(401172); MYO10(4651); PRLR(5618); |
|---|---|---|
| | | FLJ321657(64417); F2RL2(2151); ARSB(411); LYSMD3(116068); |
| | | ELL2(22936); TRIM36(55521); ZNF608(57507); NR3C1(2908); |
| | | KIAA0676(23061); BMP6(654); ITPR3(3710); ENPP4(22875); |
| | | LRRC1(55227); GRMl(2911); SASH1(23328); QKI(9444); SSR1 |
| | | (6745); TRAM2(9697); ELOVL5(60481); COL12A1(1303); |
| | | SEC63(11231); CD164(8763); HBS1L(10767); AGPAT4(56895); |
| | | ADCY1(107); RCP9(27297); PTPN12(5782); PIK3CG(5294); |
| | | MKLN1(4289); FLJ32786(136332); ARHGEF5(7984); OSBPL3 |
| | | (26031); CDK6(1021); CREB3L2(64764); GPR124(25960); |
| | | UBE2V2(7336); RBM35A(54845); PPP1R3B(79660); KIF13B |
| | | (23303); GSR(2936); IMPAD1(54928); ZNF706(51123); ANGPT1 |
| | | (284); TRPS1(7227); MLANA(2315); NR4A3(8013); PALM2 |
| | | (114299); NEK6(10788); C9orf58(83543); KIAA1815(79956); |
| | | ZDHHC21(340481); GAS1(2619); KLF4(9314); RBM18(92400); |
| | | SURF4(6836); PCGF5(84333); CASC2(255082); PTPRE(5791); |
| | | ITIH5(80760); P4HA1(5033); Cl0orf56(219654); FGFR2(2263); |
| | | PPFIBP2(8495); TEAD1(7003); Cllorf9(745); LOC399947 |
| | | (399947); TBRG1(84897); COPB(1315); OSBP(5007); FZD4 |
| | | (8322); ETS1(2113); CCND2(894); ATF7IP(55729); KLHDC5 |
| | | (57542); SP1(6667); ZNF140(7699); M6PR(4074); PTHLH |
| | | (5744); PTPRB(5787); EEA1(8411); SLC41A2(84102); ANAPC7 |
| | | (51434); RIMBP2(23504); RFP2(10206); KATNAL1(84056); |
| | | RP11-125A7.3(23078); NUFIP1(26747); CGRRF1(10668); |
| | | PLEKHH1(57475); SLC39A9(55334); KIAA0247(9766); |
| | | Cl4orf111(51077); IPO4(79711); KLF13(51621); CASC4 |
| | | (113201); CD276(80381); AQR(9716); RAB27A(5873); PRTG |
| | | (283659); SUHW4(54816); CSNK1G1(53944); CALML4(91860); |
| | | UACA(55075); SCAMP2(10066); LOC400451(400451); CBFB(865); |
| | | ASCIZ(23300); LITAF(9516); CMTM4(146223); ASPA(443); |
| | | WSB1(26118); PNPO(55163); HLF(3131); TMEM49(81671); |
| | | RPS6KB1(6198); SOX9(6662); raptor(57521); METT10D(79066); |
| | | FLOT2(2319); C17orf42(79736); RFFL(117584); GNA13(10672); |
| | | FLJ45079(400624); USP14(9097); ARHGAP28(79822); RNMT(8731); |
| | | NFATC1(4772); TCEB3C(162699); ACAA2(10449); PTBP1(5725); |
| | | ZNF440(126070); NFIX(4784); ZNF336(64412); TPD52L2(7165); |
| | | PTGIS(5740); CBLN4(140689); C21orf91(54149); BRWD1(54014); |
| | | HMG2L1(10042); APOL6(80830); PPARA(5465); PPM1F(9647); |
| | | TPST2(8459); CA5B(11238); YIPF6(286451); PHF6(84295); |
| | | ZNF449(203523); ARSD(414); DMD(1756); RNF12(51132); RP11- |
| | | 217H1.1(84061); APLN(8862); RP11-308B5.5(159090); MAGEA5 |
| | | (4104); |
| hsa-miR-128a | 3378; 3465; 874; 875; | KIF1B(23095); C1orf144(26099); FAM102B(284611); CYB561D1 |
| | 876; 877; 878; 879; | (284613); VANGL1(81839); RASAL2(9462); C1orf69(200205); |
| | 880; 881; 882; 883; | DISC1(27185); TRIM58(25893); IL28RA(163702); AK2(204); |
| | 884; 885; 886; 887; | KCNJ10(3766); LPGAT1(9926); USH2A(7399); CASP8(841); |
| | 888; 889; 890; | PGAP1(80055); |

TABLE 4-122

| | | |
|---|---|---|
| | | WDFY1(57590); ITGA9(3680); ZNF621(285268); DTX3L |
| | | (151636); ARMC8(25852); ZNF445(353274); CDCP1(64866); |
| | | TBC1D1(23216); MOBKL1A(92597); LETM1(3954); FLJ338991 |
| | | (285521); FAM105B(90268); NDST1(3340); SGCD(6444); |
| | | SLC22A7(10864); ICK(22858); TSPAN13(27075); CPA4 |
| | | (51200); PMS2(5395); CALN1(83698); PMS2L2(5380); |
| | | KBTBD11(9920); SLC7A2(6542); TACC1(6887); C8orf42 |
| | | (157695); C9orf47(286223); C9orf28(89853); VAV2 |
| | | (7410); MARCH8(220972); SAR1A(56681); SORL1(6653); |
| | | TOLLIP(54472); PPP2R1B(5519); FLJ25477(219287); |
| | | SLC7A1(6541); XRCC3(7517); EIF3S1(8669); CD276 |
| | | (80381); IL16(3603); GRAMD2(196996); FLJ22795(80154); |
| | | PDPK1(5170); EXISC6(118460); STXBP4(252983); UNQ5783 |
| | | (388325); FLJ31952(146857); LOC162427(162427); |
| | | TMEM101(84336); C17orf62(79415); C18orf25(147339); |
| | | SS18(6760); MUM1(84939); LOC390980(390980); ZNF329 |
| | | (79673); PLAGL2(5326); FLJ30313(253868); DGCR2(9993); |
| | | HTF9C(27037); PHF6(84295); DCX(1641); PRKY(5616); |
| hsa-miR-150 | 3379; 3624; 3625; 3626; | NMNAT1(64802); KIF1B(23095); PQLC2(54896); C1orf130 |
| | 3627; 3628; 3629; 3630; | (400746); MANEAL(149175); C1orf108(79647); RP4-692D3.1 |
| | | (80098); DMBX1(127343); PRPF38A(84950); FAM73A(374986); |
| | | GPSM2(29899); MGC29891(126626); IGSF4B(57863); ATF6 |
| | | (22926); IPO9(55705); FLVCR(28982); C1orf69(200205); |
| | | TRIM58(25893); DFFA(1676); FBXO42(54455); PTAFR(5724); |
| | | TTMB(399474); DBT(1629); C1orf183(55924); ENSA(2029); |
| | | CTSS(1520); GON4L(54856); ISG2OL2(81875); CD84(8832); |
| | | GPR161(23432); SYT2(127833); RIPK5(25778); C1orf73 |
| | | (25896); CEP68(23177); PCYOX1(51449); FLJ20758(55037); |
| | | LIMS1(3987); SFT2D3(84826); BMPR2(659); CYP20A1(57404); |
| | | ABI2(10152); CREB1(1385); RNASEH1(246243); LOC116143 |
| | | (116143); GFPT1(2673); FLJ14397(84865); LOC388969 |
| | | (388969); RNF149(284996); FLJ16008(339761); GPR155 |
| | | (151556); SLC19A3(80704); KIF1A(547); FANCD2(2177); |
| | | IRAK2(3656); GALNTL2(117248); ZNF621(285268); CDGAP |
| | | (57514); ARGFX(503582); EIF2A(83939); THRB(7068); |
| | | SEC22L3(9117); ZNF445(353274); LRRC2(79442); FLJ44076 |
| | | (401080); TOPBP1(11073); MGC40579(256356); PCYT1A(5130); |
| | | PDLIM5(10611); LRPAP1(4043); SLC7A11(23657); KIAA1909 |
| | | (153478); RNUXA(51808); LOC90624(90624); KCTD16(57528); |
| | | MYOZ3(91977); LARP1(23367); ICF45(54974); ERGIC1(57222); |
| | | LOC134147(134147); RPL37(6167); P18SRP(285672); FLJ25680 |
| | | (134187); IRF1(3659); KLHL3(26249); CCDC69(26112); GRM6 |
| | | (2916); MAPK13(5603); C6orf69(222658); GLP1R(2740); |
| | | RPL7L1(285855); PTK7(5754); FBXO9(26268); KIAA1919 |
| | | (91749); MYB(4602); NUDT3(11165); MDGA1(266727); USP49 |
| | | (25862); GATAD1(57798); ZKSCAN1(7586); HIG2(29923); CYCS |
| | | (54205); FLJ10803(55744); TMED4(222068); FLJ44060(346288); |
| | | PDAP1(11333 |

TABLE 4-123
); RABL5(64792); SLC35B4(84912); CLN8(2055); ZDHHC2(51201);
SPFH2(11160); SGK3(23678); CHMP4C(92421); ZNF696(79943);
ZNF7(7553); CTSB(1508); STAR(6770); PDE7A(5150); PRDM14
(63978); FAM84B(157638); PYCRL(65263); ACO1(48); NTRK2(4915);
MAK10(60560); C9orf47(286223); RAD23B(5887); ZNF483(158399);
SLC31A1(1317); C9orf106(414318); SMU1(55234); CORO2A(7464);
VAV2(7410); GTPBP4(23560); DHTKD1(55526); CAMK1D(57118);
EIF4EBP2(1979); LOC196752(196752); LDB3(11155); NEURL(9148);
PDCD4(27250); LRRC27(80313); ITIH5(80760); C10orf72(196740);
SAR1A(56681); SEC31L2(25956); BNIP3(664); TUB(7275); PRRG4
(79056); STX3A(6809); DAK(26007); LOC220070(220070); B3Gn-T6
(192134); C11orf1(64776); CBL(867); TBRG1(84897); TRAF6(7189);
FADS1(3992); SPTBN2(6712); PGM2L1(283209); SCN4B(6330); SCN2B
(6327); ADIPOR2(79602); FLJ20489(55652); ERBB3(2065); SLC35E3
(55508); FLJ11259(55332); GTF2H3(2967); AICDA(57379); MGC24039
(160518); SMARCC2(6601); CTDSP2(10106); CPM(1368); SPPL3
(121665); DDX51(317781); GOLGA3(2802); ZNF605(90462); MRP68
(78988); RANBP5(3843); OXA1L(5018); RNF31(55072); Cl4orf111
(51077); NRXN3(9369); C14orf153(84334); ACTN1(87); SPTLC2
(9517); C14orf143(90141); CEP27(55142); 76P(27229); PLDN
(26258); NGRN(51335); LRRC57(255252); CLN6(54982); HEXA(3073);
TBL3(10607); MGC2654(79091); NFATC2IP(84901); SPN(6693);
PRRT2(112476); NUP93(9688); MARVELD3(91862); PKMYT1(9088);
FLJ132130(146540); FLJ10815(55238); CMTM4(146223); RANBP10
(57610); AP1G1(164); GARNL4(23108); MYOCD(93649); WSB1(26118);
TMEM97(27346); NEK8(284086); RAB11FIP4(84440); NKIRAS2(28511);
AOC3(8639); RND2(8153); ASB16(92591), ITGB3(3690); PNPO(55163);
PRR11(55771); METTL2A(339175); SSTR2(6752); SMYD4(114826);
TSR1(55720); GGT6(124975); DHX33(56919); GRAP(10750); RAD51L3
(5892); FLJ31952(146857); PLXDC1(57125); GJA7(10052); ZNF161
(7716); SMURF2(64750); RNF157(114804); TBC1D16(125058); FLJ90757
(440465); RNF165(494470); ENOSF1(55556); TNFAIP8L1(126282);
LDLR(3949); ZNF440(126070); MGC3207(84245); ZNF430(80264);
ZNF526(116115); SPIB(6689); POLR2E(5434); LRG1(116844); DPP9
(91039); SLC35E1(79939); C19orf12(83636); KIAA1559(57677);
FBXO27(126433); OPA3(80207); KLK10(5655); MGC35402(399669);
ZNF160(90338); ZNF667(63934); DUXA(503835); POFUT1(23509);
C20orf121(79183); C20orf6(51575); C20orf117(140710); KIAA0889
(25781); SAMHD1(25939); RBL1(5933); ZHX3(23051); C21orf62(56245);
MAFF(23764); TNRC6B(23112); LOC63929(63929); PPARA(5465);
LOC128977(128977); IL2RB(3560); PLP2(5355); EDA(1896); PGK1(5230);
BIRC4(331); FAM51A1(5

TABLE 4-124

| | | |
|---|---|---|
| | | 4960); ACOT9(23597); CXorf38(159013); GRIPAP1(56850); |
| | | RP11-217H1.1(84061); IDS(3423); IRAK1(3654); PRKY(5616); |
| hsa-miR-154 | 3380; 3631; 3632; 3633; | ZMYM1(79830); MASP2(10747); KIAA0090(23065); |
| | 3634; 3635; 3636; 3637; | OXCT2(64064); FUBP1(8880); TADA1L(117143); KLHL12 |
| | 3638; | (59349); NUCKS1(64710); PAPOLG(64895); MRPL19(9801); |
| | | MAT2A(4144); RGPD5(84220); ITGA6(3655); KIF3C(3797); |
| | | CYP1B1(1545); MGAT4A(11320); ORC4L(5000); CACNB4(785); |
| | | GPR155(151556); CHL1(10752); IGSF4D(253559); CLDN11 |
| | | (5010); SATB1(6304); GALNT7(51809); HSD17B13(345275); |
| | | DKK2(27123); PLA2G12A(81579); F2R(2149); ARSK(153642); |
| | | PURA(5813); GABRG2(2566); SEMA5A(9037); PRLR(5618); |
| | | P18SRP(285672); HNRPA0(10949); CDC40(51362); SSR1 |
| | | (6745); SEC63(11231); RABGEF1(27342); ADAM22(53616); |
| | | CALU(813); MGC14289(92092); TUSC3(7991); ZDHHC2(51201); |
| | | RP1(6101); CPNE3(8895); MTMR7(9108); ZCCHC7(84186); |
| | | NTRK2(4915); FLJ45537(401535); STX17(55014); PALM2 |
| | | (114299); ABO(28); C10orf47(254427); WAC(51322); ZNF33A |
| | | (7581); ZNF365(22891); PCGF5(84333); NOLC1(9221); YME1L1 |
| | | (10730); CUL2(8453); ZNF11B(7558); DKFZp686O24166(374383); |
| | | RAG1(5896); SLC1A2(6506); KIAA1467(57613); C12orf29(91298); |
| | | RAD9B(144715); ASB8(140461); BRAP(8315); CAMKK2(10645); |
| | | FNDC3A(22862); FLJ22624(79866); HS6ST3(266722); ARHGEF7 |
| | | (8874); PRPF39(55015); RCOR1(23186); MAP3K9(4293); |
| | | Cl4orf103(55102); Gcom1(145781); IREB2(3658); UBE3A(7337); |
| | | TP53BP1(7158); SLC7A6(9057); USP31(57478); RHOT1(55288); |
| | | ITGB3(3690); CROP(51747); STKBP4(252983); FLJ36492(284047); |
| | | DTNA(1837); RNF165(494470); MALT1(10892); DLGAP1(9229); |
| | | HIF3A(64344); ZNF709(163051); C20orf77(58490); KIAA1219 |
| | | (57148); PLAGL2(5326); AURKA(6790); ABCC13(150000); |
| | | DYRK1A(1859); BCL21L3(23786); OGT(8473); ARMCX4(158947); |
| | | VSIG1(340547); LOC203547(203547); SPRY3(10251); DCX(1641); |
| | | DAZ2(57055); |
| hsa-miR-299-3p | 3381; 3639; 3640; | VWA1(64856); Clorf188(148646); TNFRSF1B(7133); CDC42(998); |
| | | TMEM50A(23585); TXLNA(200081); FBXO28(23219); Clorf95 |
| | | (375057); C1orf69(200205); CHD5(26038); DDEFL1(55616); |
| | | CPATC3(63906); GLT25D2(23127); C1orf80(64853); SMYD1 |
| | | (150572); INPP4A(3631); COPS7B(64708); SCLY(51540); PGAP1 |
| | | (80055); IGFBP5(3488); COL4A4(1286); GNAT1(2779); QTRTD1 |
| | | (79691); DTX3L(151636); KALRN(8997); UMPS(7372); RAB7 |
| | | (7879); NEK11(79858); BPESC1(60467); CYP8B1(1582); CD47 |
| | | (961); FSTL1(11167); AMOTL2(51421); LOC285382(285382); |
| | | STX18(53407); DKFZp761B107(91050); PPAT(5471); FLJ30834 |
| | | (132332); FLJ32028(201799); ARHGAP26(23092); LARP1(23367); |
| | | SGCD(6444); TERT(7015); ZBED3(84327); FSTL4(23105); PDE6A |
| | | (5146); DC-UbP(92181); GFPT2(9945); NOL7(51406); FLJ46422 |
| | | (441140); FOXP4(116113); D |

TABLE 4-125

| | | |
|---|---|---|
| | | OPEY1(23033); SLC35F1(222553); ATXN1(6310); MDGA1 |
| | | (266727); AARSL(57505); TTYH3(80727); ELN(2006); |
| | | PMS2L5(5383); ADAM22(53616); LMTK2(22853); GLI3 |
| | | (2737); PURB(5814); UBE2H(7328); PAXIP1(22976); |
| | | ZNF705CP(389631); SORBS3(10174); PPP1R3B(79660); |
| | | C8orf13(83648); ANK1(286); LOC401507(401507); |
| | | NTRK2(4915); PAPPA(5069); SLC25A25(114789); |
| | | PTPLAD2(401494); C9orf25(203259); FLJ45202(401508); |
| | | FBP2(8789); ASB6(140459); C10orf39(282973); SYT15 |
| | | (83849); KCNMA1(3778); GRID1(2894); NAV2(89797); |
| | | TSPAN18(90139); SART1(9092); MGC33486(256472); |
| | | PELI3(246330); LRP4(4038); PCSK7(9159); TSPAN9 |
| | | (10867); KCNA6(3742); TAPBPL(55080); TENC1(23371); |
| | | RBMS2(5939); SLC16A7(9194); OAS3(4940); TCF1(6927); |
| | | VAMP1(6843); C1RL(51279); SOX5(6660); CAMKK2(10645); |
| | | SPATA13(221178); ATP11A(23250); KIAA1008(22894); |
| | | ATP4B(496); TRAF3(7187); JPH4(84502); TRIM9(114088); |
| | | GNPNAT1(64841); TRMT5(57570); NDNL2(56160); C15orf38 |
| | | (348110); RAB11FIP3(9727); TRAF7(84231); MGC2654 |
| | | (79091); LOC339123(339123); LOC94431(94431); BOLA2 |
| | | (552900); KIAA1609(57707); KIF1C(10749); TMEM88 |
| | | (92162); LLGL1(3996); TNFAIP1(7126); FOXN1(8456); |
| | | MLLT6(4302); NXPH3(11248); CROP(51747); WDR68(10238); |
| | | KIAA1787(84461); NR1D1(9572); SLC4A1(6521); TIMP2 |
| | | (7077); C18orf2(56651); LOC91661(91661); ANKRD25 |
| | | (25959); ZNF585A(199704); CBFA2T2(9139); BCAS4(55653); |
| | | RNF24(11237); CD93(22918); ZHX3(23051); ZNFX1(57169); |
| | | PPP1R3D(5509); DIDO1(11083); CHRNA4(1137); TIMP3(7078); |
| | | SYNGR1(9145); TNRC6B(23112); C22orf8(55007); PPARA |
| | | (5465); MGC16703(113691); MAPK1(5594); DERL3(91319); |
| | | PITPNB(23760); KIAA1904(114794); MSL3L1(10943); EIF2S3 |
| | | (1968); ZXDB(158586); DRP2(1821); XPNPEP2(7512); RP11- |
| | | 393H10.2(256714); COL4A6(1288); CD99L2(83692); |
| hsa-miR-380-5p | 3382; 3641; | LPGAT1(9926); ITPKB(3707); OPA1(4976); KLHL6(89857); |
| | | ADAM29(11086); SLC30A8(169026); PLAG1(5324); NCBP1 |
| | | (4686); CXCL12(6387); RBMS2(5939); ANKRD13(88455); |
| | | ATP8A2(51761); DZIP1(22873); EXOC5(10640); RNF111 |
| | | (54778); UBE3A(7337); TMC6(11322); C20orf91(284800); |
| | | ABAT(18); ACHE(43); ADCY1(107); ADCY7(113); APBA1 |
| | | (320); AQP2(359); ARSB(411); ARSD(414); ASCL1(429); |
| | | ASTN(460); ATP2B3(492); KIF1A(547); BACH1(571); BAPX1 |
| | | (579); BCL3(602); PRDM1(639); C7(730); C11orf9(745); |
| | | CAMK2D(817); RUNX1T1(862); TNFSF8(944); CD37(951); |
| | | CDH4(1002); CDSN(1041); CETN1(1068); CEACAM8(1088); |
| | | CCR2(1231); CNN2(1265); COL1A2(1278); COL3A1(1281); |
| | | COL4A4(1286); COX15(1355); CRHR2(1395); CSNK1G3(1456); |
| | | CTNNA1(1495); CTSB(1508); CXorf2(1527); CYP1B1(1545); |
| | | CYP8B1(1582); DDX11(1663); DLD(1738); DPP6(1804); DPYS |
| | | (1807); DTNA(1837); ECM2(184 |

TABLE 4-126

| | | |
|---|---|---|
| | | 2); ELF4(2000); EPB41L1(2036); FANCA(2175); EFEMP1 |
| | | (2202); FGF13(2258); FKBP4(2288); FOSB(2354); FXN |
| | | (2395); DARC(2532); G1P3(2537); GABRA4(2557); GM2A |
| | | (2760); GOLGA2(2801); GPD2(2820); GPR4(2828); GRK6 |
| | | (2870); GRB10(2887); GRIA1(2890); GRM1(2911); GRM6 |
| | | (2916); CXCL1(2919); HAGH(3029); HLF(3131); HLA-E |
| | | (3133); HMGN2(3151); HNRPA2B1(3181); HNRPH1(3187); |
| | | TLX1(3195); HOXA1(3198); HOXA13(3209); HOXB9(3219); |
| | | HSP90AB1(3326); DNAJB1(3337); IDI1(3422); IGLL1 |
| | | (3543); IL1RAP(3556); ITGA9(3680); |
| hsa-miR-383 | 3383; 3642; 3643; 3644; | UBXD3(127733); SLC35A3(23443); VANGL1(81839); |
| | 3645; 3646; 3647; 3648; | POGK(57645); TBX19(9095); PRRX1(5396); C1orf76 |
| | | (148753); SOX13(9580); ECE1(1889); LMX1A(4009); |
| | | SYT2(127833); YOD1(55432); SMYD1(150572); CCNT2 |
| | | (905); MALL(7851); WDR33(55339); NCKAP1(10787); |
| | | ERBB4(2066); CDV3(56573); RAP2B(5912); MFN1 |
| | | (55669); C1QTNF7(114905); PCDHGB4(8641); LSM11 |
| | | (134353); HMGCS1(3157); FLJ25680(134187); MARCH3 |
| | | (115123); FOXO3A(2309); HDAC9(9734); JAZF1(221895); |
| | | PDLIM2(64236); ZNF706(51123); RALGPS1(9649); GLIS3 |
| | | (169792); MOBKL2B(79817); POLE3(64107); FBXW2(26190); |
| | | LOC196752(196752); SCD(6319); TRIM6(117854); NCAM1 |
| | | (4684); NRGN(4900); NPAT(4863); SCN3B(55800); ADIPOR2 |
| | | (79602); TCHP(84260); CBX5(23468); HS6ST3(266722); |
| | | ARHGEF7(8874); ZNF410(57862); FLJ41170(440200); STRN3 |
| | | (29966); CHES1(1112); D4ST1(113189); PLDN(26258); |
| | | GLDN(342035); ZNF609(23060); PIAS1(8554); MESDC2 |
| | | (23184); Cl5orf38(348110); HAS3(3038); HAGH(3029); |
| | | ZNF694(342357); GARNL4(23108); RHOT1(55288); |
| | | FLJ42842(440446); FLJ81952(146857); GCN5L2(2648); |
| | | MRPL27(51264); SFRS2(6427); MAFG(4097); CNDP1(84735); |
| | | C18orf4(92126); PDE4A(5141); GRWD1(83743); POFUT1 |
| | | (23509); C20orf77(58490); STK4(6789); PTPRT(11122); |
| | | SLC13A3(64849); PPP1R3D(5509); TNRC6B(23112); ADM2 |
| | | (79924); ZXDB(158586); ZC3H12B(340554); |
| hsa-miR-411 | 3384; 3649; 3650; 3651; | SAMD11(148398); FLJ45337(400754); SH3GLB1(61100); |
| | | DBT(1629); LOC165186(165186); RHOQ(23433); SLC9A2 |
| | | (6549); GFPT1(2673); IL17RB(55540); SLC4A7(9497); |
| | | MGC40579(256356); GP5(2814); FLJ14001(79730); CDS1 |
| | | (1040); TNPO1(3842); PHF15(23338); FEM1C(56929); ABT1 |
| | | (29777); TUBB2B(347733); ASCC3(10973); ARHGAP18(93663); |
| | | CDK6(1021); MGC14289(92092); RAD23B(5887); GPR107(57720); |
| | | BTRC(8945); BNIP3(664); CD59(966); RAB30(27314); MMP19 |
| | | (4327); PAWR(5074); FLJ20674(54621); SLC7A1(6541); NRXN3 |
| | | (9369); SDCCAG1(9147); SYNJ2BP(55333); FLJ22795(80154); |
| | | TRAF7(84231); BOLA2(552900); LOC283849(283849); ARHGAP28 |
| | | (79822); EGFL4(1954); EMR3(84658); FUT1(2523); SNPH(9751); |
| | | POFUT2(23275); WNK3(65267); CHM(1121); |

TABLE 4-127

| | | |
|---|---|---|
| | | ADRBK1(156); AP1G1(164); AGTRLI(187); ALDH3A2(224); |
| | | APC(324); APCS(325); ARHGDIB(397); ATP2B4(493); |
| | | AUH(549); BRCA1(672); C11orf9(745); CACNA1C(775); |
| | | DDR1(780); CACNB4(785); CALB1(793); CALM1(801); |
| | | CASP2(835); CASP10(843); RUNX2(860); RUNX1T1(862); |
| | | CCNT2(905); CDH1(999); CDH2(1000); CDH5(1003); |
| | | CENPC1(1060); CHRNA1(1134); CLTB(1212); CCR1(1230); |
| | | COL9A3(1299); CRKL(1399); CSF2RB(1439); CSNK1E(1454); |
| | | CSPG2(1462); CTSB(1508); CYLD(1540); CFD(1675); |
| | | DHCR24(1718); DIO2(1734); DSC2(1824); DUSP1(1843); |
| | | DYRK1A(1859); E2F3(1871); EDA(1896); EEF1A1(1915); |
| | | EGFR(1956); EIF1AX(1964); EIF4B(1975); EIF4G2(1982); |
| | | ENSA(2029); ERBB2(2084); ERBB4(2066); F3(2152); |
| hsa-miR-423 | 3385; 3652; 3653; 3654; | SAMD11(148398); VWA1(64856); KCNAB2(8514); |
| | | C1orf188(148846); KIAA1026(23254); EPHD2(79180); |
| | | PDIK1L(149420); CTPS(1503); C1orf164(55132); |
| | | RAD54L(8438); CD2(914); FDPS(2224); KIAA0446(9673); |
| | | PPP1R12B(4660); TMCC2(9911); MTR(4548); LOC440742 |
| | | (440742); NPHP4(261734); CTNNBIP1(56998); ECE1(1889); |
| | | MTF1(4520); KCNN3(3782); CLK2(1196); GLT25D2(23127); |
| | | PCNXL2(80003); AKT3(10000); HSPC159(29094); |
| | | BCL2L11(10018); GYPC(2995); GPR39(2863); IGFBP2 |
| | | (3485); ALPPL2(251); ASB1(51665); ING5(84289); |
| | | DNMT3A(1788); SLC30A3(7781); ZFP36L2(678); |
| | | GPR75(10936); SERTAD2(9792); LOXL3(84695); |
| | | TGOLN2(10618); STARD7(56910); FLJ10996(54520); |
| | | LYPD1(116372); FLJ46347(389064); IGFEBP5(3488); |
| | | BHLHB2(8553);CAV3(859); SLC22A13(9390); ARGFX |
| | | (503582); TMEM111(55831); TMEM40(55287); |
| | | ZCSL2(285381); ACAA1(30); IGSF11(152404); |
| | | RAB6B(51560); IGF2BP2(10644); HD(3064); |
| | | LOC345222(345222); EVC(2121); SLC25A4(291); |
| | | STX18(53407); ACOX3(8310); FLJ23235(80008); |
| | | PHOX2B(8929); TSPAN5(10098); LRP2BP(55805); |
| | | CENPH(64946); PCDHB9(56127); DNAJC18(202052); |
| | | PDE6A(5145); CAMK2A(815); KIAA1191(57179); |
| | | TRIM7(81786); C6orf25(80739); VEGF(7422); |
| | | SMOC2(64094); PRRT1(80863); TAPBP(6892); |
| | | CLIC5(58405); COX7A2(1347);C6orf166(55122); |
| | | PDSS2(57107); DLL1(28514); RAC1(5879); |
| | | ADCY1(107); MGC33530(222008); ASB15(142685); |
| | | LEP(3952); SMO(6608); MGC9712(202915); |
| | | SCRN1(9805); WBSCR16(81554); PDAP1(11333); |
| | | GATS(352954); SLC37A3(84255); PRKAG2(51422); |
| | | DPYSL2(1808); RHPN1(114822); FAM86B1(85002); |
| | | PSD3(23362); LOXL2(4017); DUSP4(1846); DKK4 |
| | | (27121); PABPC1(26986); LYNX1(66004); |
| | | ZNF16(7564); VLDLR(7436); FGD3(89846); |
| | | TMOD1(7111); FOXE1(2304); PALM2-AKAP2 |
| | | (445815); C90rf28(89853); SLC27A4(10999); |
| | | ODF2 (4957); SET(6418); UAP1L1(91373); |
| | | CACNA1B(774); EPB41L4B(54566); CDK5RAP2 |
| | | (55755); RAB14(51552); C9orf88(64855); |
| | | C9orf140(89958); CALML3(810); SEC61 |

TABLE 4-128
A2(55176); CREM(1390); SH2D4B(387694); C10orf99(387695);
SFMBT2(57713); NUDT5(11164); C10orf111(221060); ITGB1(3688);
RHOBTB1(9886); C10orf54(64115); DNAJB12(54788); SFTPA2
(6436); FER1L3(26509); FGFR2(2263); TRIM22(10346); TSPAN18
(90139); KIAA0652(9776); ESRRA(2101); KLC2(64837); TPCN2
(219931); CUL5(8065); NCAM1(4684); PKNOX2(63876); JAM3(83700);
POLR2L(5441); TRIM68(55128); DKK3(27122); CLCF1(23529);
FLJ37266(283225); CDON(50937); ADIPOR2(79602); HOXC12(3228);
NRIP2(83714); BCAT1(586); SLC11A2(4891); CTDSP2(10106);
GALNT4(8693); KCTD10(83892); CAMKK2(10645); FLJ22471(80212);
IL17D(53342); FGF9(2254); PABPC3(5042); MGC9850(219404);
FRY(10129); LOC440138(440138); PHGDHL1(337867); COL4A2(1284);
PROZ(8858); POSTN(10631); DOCK9(23348); IRS2(8660); LOC440157
(440157); C140rf132(56967); KIAA1443(57594); TM9SF1(10548);
L2HGDH(79944); LOC440248(440248); CCNDBP1(23582); RCN2(5955);
CRTC3(64784); UBE3A(7337); MYO5A(4644); ITGA11(22801); MGRN1
(23295); NUBP1(4682); PRRT2(112476); RNF40(9810); GPT2(84706);
LONPL(83752); SF3B3(23450); FLJ31875(197320); CDK10(8558);
FBXL16(146330); TXNDC11(51061); LOC283849(283849); SLC12A4
(6560); NQO1(1728); WDR59(79726); KCNG4(93107); Pfs2(51659);
ZCCHC14(23174); MGC26885(124044); C16orf7(9605); KIF1C(10749);
MAPK7(5598); STARD3(10948); STAT5A(6776); CACNG4(27092); KCTD2
(23510); SEC14L1(6397); CHMP6(79643); FOXK2(3607); RPH3AL(9501);
CRK(1398); RILP(83547); SMYD4(114826); ANKFY1(51479); GRAP(10750);
jUP(3728); PECAM1(5175); RECQL5(9400); PTDSR(23210); C17orf70
(80233); C17orf62(79415); DTNA(1837); SLC14A1(6563); TNFRSF11A
(8792); NFATC1(4772); DLGAP1(9229) YZR1(51343); GIPC3(126326);
MRPL4(51073); FLJ25328(148231); GATAD2A(54815); FFAR1(2864);
CACNG6(59285) FCAR(2204);ZNF471(57573); C19orf23(148046); ZBTB7A
(51341); PRSSS15(9361); CD209(30835); ZNF490(57474); HAPLN4(404037);
POU2F2(5452); DMPK(1760); FLJ10490(55150); ZNF667(63934); TTLL9
(164395); POFUT1(23509); ASXL1(171023); RAB22A(57403); VAPB(9217);
EDN3(1908); GTPBP5(26164); C20orf11(54994); ZGPAT(84619); NSFL1C
(55968); ZHX3(23051); RIMS4(140730); FLJ30313(253868); BTBD4(140685);
SIM2(6493); PDXK(8566); SEPT5(5413); LOC400891(400891); HIC2(23119);
UBE2L3(7332); KIAA0376(23384); POLR2F(5435); MPPED1(758); FLJ20699
(55020); PANX2(56666); DGCR2(9993); C22orf16(400916); RP5-1119A7.4
(80020); LOC400927(400927) ;DNAL4(10126); CBX7(23492); SCUBE1(80274);
INE1(8552); TRO(7216); NRK(203447); BCORL1(63035); PLXNB3(5365);
SLC35A2(7355), WNK3(65267); RAP2C(57826); HS6ST2(9016

TABLE 4-129

| | | |
|---|---|---|
| | | 1); CD99L2(83692); HCFC1(3054); |
| hsa-miR-433 | 3386; 3655; 3656; 3657; 3658; | PRPF38A(84950); SLC30A7(148867); UHMK1 |
| | | (127933);PTPRC(5788); NR5A2(2494); |
| | | DISC1(27185); TR1M58(25893); HP1BP3(50809); |
| | | RAB3B(5865); GBP4(115361); TMED5(50999); |
| | | SASS6(163786); HRNR(388697); SHE(126669); |
| | | AKT3(10000); CCDC75(253635); STON1(11037); |
| | | PCYOX1(51449); ZC3H6(376940); ITGAV(3685); |
| | | BMPR2(669); CREB1(1385); CYP1B1(1545); |
| | | PPP3R1(5534); C2orf3(6936); ORC4L(5000); |
| | | CACNB4(785); SESTD1(91404); ERBB4(2066); |
| | | OGG1(4968); ZNF620(253639); KBTBD8(84541); |
| | | MRPS25(64432); ZFYVE20(64145); LRRC2(79442); |
| | | ACTR8(93973); MAGI1(9223); CD200R1(131450); |
| | | IGSF11(152404); STAG1(10274); COMMD2(51122); |
| | | TMEM33(55161); STOX2(56977); CYP4V2(285440); |
| | | SLA/LP(51091); SLC7A11(23657); FLJ38482(201931); |
| | | ENPP6(133121); SORBS2(8470); MAP1B(4131); |
| | | SCAMP1(9522); LOC91137(91137); WDR36(134430); |
| | | RPL37(6167); P18SRP(285672); MTX3(345778); |
| | | ST8SIA4(7903); RAPGEF6(51735); LRRTM2(26045); |
| | | MICB(4277); C6orf71(389434); QKI(9444); |
| | | TAP2(6891); STK38(11329); PKHD1(5314); GCLC(2729); |
| | | SLC17A5(26503); EPHA7(2045); AGPAT4(56895); KLHL7 |
| | | (55975); MGC42090(256130); OSBPL3(26031); CYCS |
| | | (54205); PURB(5814); ZNF705CP(389631); ZDHHC2 |
| | | (51201); LPL(4023); LEPROTL1(23484); SULF1(23213); |
| | | PHF20L1(51105); MSR1(4481); ADRA1A(148); ARMC1 |
| | | (55156); SLA(6503); PTK2(5747); NTRK2(4915); |
| | | TGFBR1(7046); MOBKL2B(79817); C9orf72(203228); |
| | | FANCC(2176); ARL5B(221079); ADD3(120); NMT2(9397); |
| | | KCNMA1(3778); SLC16A12(387700); GOT1(2805); KCNIP2 |
| | | (30819); GFRA1(2674); STX3A(6809); LIN7C(55327); |
| | | BDNF(627); C11orf55(899879); SLC36A4(120103); |
| | | SESN3(143686); PTPRO(5800); SSPN(8082); SLC16A7 |
| | | (9194); TMTC3(160418); TMEM132B(114795); GLS2 |
| | | (27165); KLF12(11278); DCT(1638); PPM1A(5494); |
| | | PLEKHC1(10979); MED6(10001); NEK9(91754); CHES1 |
| | | (1112); CHRNA7(1139); CEP27(55142); GLDN(342035); |
| | | TPM1(7168); LOC440295(440295); UBR1(197131); |
| | | DENND4A(10260); SPN(6693); AYTL1(54947); CBFB |
| | | (865); GAN(8139); SMG1(23049); USP31(57478); |
| | | BCL6B(255877); ATP6V0A1(535); PRKCA(5578); |
| | | CDC27(996); MXRA7(439921); C18orf25(147339); |
| | | ENOSF1(55556); FAM59A(64762); SMAD2(4087); |
| | | MBP(4155); LDLR(3949); ZNF440(126070); ZNF700 |
| | | (90592); ZNF226(7769); ZNF304(57343); ZIK1(284307); |
| | | TNFSF14(8740); ZNF563(147837); ZFP30(22835); |
| | | PRND(23627); RBM12(10137); CHD6(84181); RBM11 |
| | | (54033); IFNAR1(3454); SLC5A3(6526); HEMK2 |
| | | (29104); TIMP3(7078); TNRC6B(23112); FLJ44385 |
| | | (400934); XG(7499); CLCN5(1184); YIPF6(286451); |
| | | ARMCX4(158947; CXorf39(139231); ATG4A(115201); |
| | | CXorf40A(91966); PNPLA4(8228); ACOT9(23597); |
| | | SMC1L1(8243); |

TABLE 4-130

| | | |
|---|---|---|
| hsa-miR-454.3p | 3387; 3659; 3660; 3661; 3696; | ATAD3C(219293); NMNAT1(64802); KIF1B(23096); |
| | 3697; 3698; 3699; 3700; 3701; | DNAJC16(23341); C1orf144(26099); KLHDC7A |
| | 3702; 3703; 3704; 3705; 3706; | (127707); STX12(23673); MED18(54797); |
| | 3707; 3708; 3709; 3710; 3711; | EIF2C4(192670); EIF2C1(26623); EIF2C3 |
| | 3712; 3713; 3714; 3715; 3716; | (192669); ZFYVE9(9372); MIER1(57708); |
| | 3717; 3718; 3719; 3720; 3721; | FAM73A(374986); CSF1(1435); VANGL1(81839); |
| | 3722; 3723; 3724; 3725; 3726; | TBX19(9095); RALGPS2(55103); LAMC1(3915); |
| | 3727; 3728; 3729; 3730; 3731; | IPO9(55705); FBXO28(23219); ZNF238(10472); |
| | | C1orf63(57035); EPS15(2060); SL035D1(23169); |
| | | SERBP1(26135); DEPDC1(55635); SEC63D1(374992); |
| | | ALG14(199857); WDR47(22911); SYT6(148281); SHE |
| | | (126669); KCNJ10(3766); STX6(10228); LPGAT1(9926); |
| | | ANGEL2(90806); NUP133(56746); MXD1(4084); PCYOX1 |
| | | (51449); RGPD2(440872); EPB41L5(57669); PLEKHB2 |
| | | (55041); GALNT13(114805); PDK1(5163); ZAK(51776); |
| | | ADAM23(8745); CREB1(1385); PIP5K3(200576); HRB |
| | | (3267); WDR35(57539); SERTAD2(9792); LOC554251 |
| | | (554251); TGOLN2(10618); ACVR1(90); PGAP1(80055); |
| | | GALNTL2(117248); TGFBR2(7048); ZNF197(10168); DOCK3 |
| | | (1795); PTPRG(5793); KBTBD8(84541); ROBO2(6092); |
| | | IGSF4D(253559); ACPL2(92370); MBNL1(4154); ATP11B |
| | | (23200); SELK(58615); MAGI1(9223); LRIG1(26018); |
| | | EIF4E3(317649); KIAA1160(57461); PLSCR4(57088); |
| | | TRIM59(286827); EIF5A2(56648); TBL1XR1(79718); |
| | | STIM2(57620); HIP2(3093); EREG(2069); CDS1(1040); |
| | | HERC3(8916); PHF17(79960); IL15(3600); TRIM2(28321); |
| | | CLCN3(1182); LRPAP1(4043); PPARGC1A(10891); CENTD1 |
| | | (116984); GABRA4(2557); ERBB2IP(55914); CAST(831); |
| | | LOC90365(90355); LOC91137(91137); PCDHB4(56131); |
| | | G3BP(10146); LSM11(134353); IRF1(3659); SAR1B(51128); |
| | | DNAJC18(202052); LARS(51520); JARID2(3720); RPL7L1 |
| | | (285855); PTP4A1(7803); COL19A1(1310); POU3F2(5454); |
| | | C6orf68(116150); GJA1(2697); KIAA1244(57221); HECA |
| | | (51696); PHACTR2(9749); RP5-875H10.1(389482); ESR1 |
| | | (2099); ZDHHC14(79683); QKI(9444); ATXN1(6310); NUDT3 |
| | | (11165); ENPP5(59084); PKHD1(5314); SYNCRIP(10492); |
| | | CDC2L6(23097); PBOV1(69351); TXLNB(167838); PIP3-E |
| | | (26034); GPR30(2852); PHF14(9678); ITGB8(3696); CREB5 |
| | | (9586); ADCY1(107); EGFR(1956); RCP9(27297); |
| | | DKFZP686A10121(85865); HBP1(26959); ZNF12(7559); |
| | | MEOX2(4223); CALN1(83698); STEAP4(79689); COG5(10466); |
| | | FLJ31818(154743); TFEC(22797); WASL(8976); CNOT4 |
| | | (4850); LMBR1(64327); MTMR9(66036); RHOBTB2(23221); |
| | | SULF1(23213); ZFPM2(23414); WHSC1L1(54904); UBE2W |
| | | (55284); FLJ20366(55638); DENND4C(55667); GDA(9615); |
| | | OSTF1(26578); HABP4(22927); SLC31A1(1317); KIAA0367 |
| | | (23273); UBQLN1(29979); IER5L(389792); TSC1(7248); |
| | | PTEN(5728); C10orf6(55719); KIAA0157(23172); LRRC27 |
| | | (80313); FLJ45187(387640); SYT15(83849); PARVA(55742); |
| | | hfl-B5(10480); FBXL11(22992); FUT4(2526); SBF2 |
| | | (81846); CHST1(8534); SHANK2(22941); UCP3(7352);PG |

TABLE 4-131

| | | |
|---|---|---|
| | | M2L1(283209); DLG2(1740); PPP2R1B(5519); 0DX6(1656); |
| | | GOLT1B(51026); KLHDC5(57542); DNM1L(10059); WNT1 |
| | | (7471); APAF1(817); CHST11(50515); UBE3B(89910); OAS2 |
| | | (4939); ATP6V0A2(23545); M6PR(4074); BHLHB3(79365); |
| | | TMTC1(83857); KRT2B(51350); IGF1(3479); FLJ20674 |
| | | (54621); RSN(6249); ZNF605(90462); PAN3(255967); |
| | | FLJ30046(122060); ATP11A(23250); RBM25(58517); YY1 |
| | | (7528); WDR20(91833); EIF5(1983); CFL2(1073); CDKL1 |
| | | (8814); KIAA0831(22863); VTI1B(10490); MAP3K9(4293); |
| | | ENTPD5(957); RPS6KA5(9252); DICER1(23405); C140rf103 |
| | | (55102); CHRNA7(1139); CHD2(1106); NIPA1(123606); |
| | | KIAA0256(9728); CPEB1(64506); LASS3(204219); MGC2654 |
| | | (79091); RUNDC2A(84127); UBPH(56061); SPN(6693); GPT2 |
| | | (84706); GNAO1(2775); ARL6IP(23204); USP31(57478); |
| | | DYNC1LI2(1783); MAF(4094); MLLT6(4302); DYNLL2 |
| | | (140735); PRR11(55771); CLTC(1213); Z3TB4(57659); |
| | | TOM1L2(146691); KRTHA8(8687); CLUL1(27098); RNF165 |
| | | (494470); SMAD4(4089); IER3IP1(51124); LDLR(3949); |
| | | ZNF430(80264); ZNF431(170959); IXL(55588); SF4(57794); |
| | | 2NF614(80110); ZNF665(79788); PLCB1(23236); PHF20 |
| | | (51230); STK4(6789); SPATA2(9825); ZNF217(7764); |
| | | TMEM50B(757); BRWD1(54014); TNRC6B(23112); DGCR14 |
| | | (8220); XK7504); APEX2(27301); ZC3H12B(340554); |
| | | OGT(8473); BIRC4(331); OCRL(4952); FMR1(2332); |
| | | ARSD(414); PIGA(5277); RPS6KA3(6197); PCYT1B(9468); |
| | | WNK3(65267); OPHN1(4983); PDZD11(51248); RAB9B(51209); |
| | | ACSL4(2182); RAP2C(57826); MECP2(4204); |
| hsa-miR-501 | 3388; 3662; 3663; 3664; | KIF1B(23095); PRDM2(7799); KIAA1026(23254); NPAL3(57185); |
| | | CLIC4(25932); PPCS(79717); KLF17(128209); DNAJC6(9829); |
| | | CLCA4(22802); HIPK1(204851); PTGFRN(5738); RBM8A(9939); |
| | | UHMK1(127933); MPZL1(9019); C1orf21(81563); C1orf27(54953); |
| | | C1orf99(339476); ATP2B4(493); C1orf107(27042); C1orf124 |
| | | (83932); KIAA1804(84451); ICMT(23463); USP48(84196); FUSIP1 |
| | | (10772); RAB3B(5865); JUN(3725); NEGR1(257194); NBPF4 |
| | | (148545); TMEM77(128338); RHOC(389); SCYL3(57147); YOD1 |
| | | (55432); LPGAT1(9926); ESRRG(2104); DUSP10(11221); ENAH |
| | | (55740); CDC42BPA(8476); FLJ45717(388759); PPP1CB(5500); |
| | | CNNM4(26504); ANKRD36(375248); MAP4K4(9448); MGC5509 |
| | | (79074);SULT1C1(6819); ACTR3(10096); CYBRD1(79901); |
| | | FLJ38973(205327); OACT2(129642); LOC51057(51057); GFPT1 |
| | | (2673); ADRA2B(151); SCN3A(6328); HSPD1(3329); ALS2CR15 |
| | | (130026); IGFBP5(3488); TMEM43(79188); ITGA9(3680); |
| | | IL17RB(55540); MME(4311); LPP(4026); RAFTLIN(23180); |
| | | SATB1(6304); SLC47(9497); MAP4(4134); PRKAR2A(5576); |
| | | FLJ34969(201627); MAGI1(9223); VGLL3(389136); |
| | | DHFRL1(200895); IFT57(55081); B4GALT4(8702); |
| | | FSTL1(11167); MGC40579(256356); XRN1(54464); |
| | | PCOLCE2(26577); C |

TABLE 4-132
OMMD2(51122); P2RY13(53829); SSR3(6747), GP5(2814); PPP1R2(5504);
LOC285429(285429); GUF1(60558); DKFZP564O0823(25849); THAP6(152815);
NPNT(255743); FLJ44691(345193); MLR1(254251); DNAJB14(79982);
PLA2G12A(81579); LRP2BP(55805); DNAJA5(134218); KIF2(3796); DCP2
(167227); GRAMD3(65983); PCDHB9(56127); KIAA0141(9812); TCOF1(6949);
G3BP(10146); SGCD(6444); RANBP17(64901); UBXD8(23197); RICTOR
(253260); ARSB(411); FLJ11292(55338); MEF2C(4208); ST8SIA4(7903);
NR3C1(2908); IRF4(3662); IBRDC2(255488); FLJ45422(441140);
LOC221442(221442); ANKRD6(22881); TCF21(6943); TBPL1(9519); MYB
(4602); HECA(51696); TULP4(56995); QKI(9444); DCDC2(51473); NUDT3
(11165); SRPK1(6732); CD164(8763); BCLAF1(9774); FOXK1(221937);
TMEM106B(54664); E11s1(222166); KCTD7(154881); PMPCB(9512); JAZF1
(221895); CALN1(83698); PDK4(5166); DGKI(9162); KBTBD11(9920); MTMR9
(66036); KIAA1456(57604); ZDHHC2(51201); LEPROTL1(23484); TACC1(6867);
PI15(51050); RIPK2(8767); RIMS2(9699); MTMR7(9108); IMPAD1(54928);
REXO1L1(254958); WDR21C(138009); SAMD12(401474); MLANA(2315); MTAP
(4507); VPS13A(23230); HIATL1(84641); PSIP1(11168); MCART1(92014);
EDG2(1902); AKNA(80709); CUGBP2(10659); PTER(9317), ARL5B(221079);
PCGF4(648); ZNF33A(7581); C10orf53(282966); C10orf42(90550); LDB3
(11155); ADRB1(153); C10orf38(221061); RP11-142117.1(26095); DNAJB12
(54788); COX15(1355); DKFZp686O24166(374383); TMEM86A(144110);
hfl-B5(10480); LOC399898(399898); HSPC196(51524); FLJ16331(440044);
SAPS3(55291); FLJ22104(65084); MIZF(25988); STS-1(84959); SLC1A2
(6506); FLJ2258(440049); UCP3(7352); GRM5(2915); JOSD3(79101);
COP1(114769); RDX(5962); KIAA0999(23387); BACE1(23621); ASAM(79827);
ADIPOR2(79602); CLEC2D(29121); ATF7IP(55729); PDE3A(5139); NEUROD4
(58158); MGC39497(144321); PWP1(11137); IFT81(28981); FGF23(8074);
OACT5(10162); C12orf33(253128); SLCO1A2(6579); BCAT1(586); ERGIC2
(51290); MGC24039(160518); C12orf22(81566); CHX5(23468); CAPS2
(84698); PHLDA1(22822); FLJ40296(122183); SLITRK5(26050), XPO4
(64328); FLJ25477(219287); KCTD12(115207); FLJ10154(55082);
NP(4860); ARHGAP5(394); KLHDC1(122773); FRMD6(122786); FBXO34
(55030); SLC24A4(123041); TCL6(27004); EML1(2009); SYNJ2BP
(55333); MED6(10001); LTBP2(4053); DIO2(1734); FLJ39531(400360);
GALK2(2585); GLDN(342035); RAB11A(8766); MAP2K1(5604); KIAA1024
(23251); MAN2A2(4122); NR2F2(7026); ALDH1A3(220); NIPA1(123606);
UBE3A(7337); SLC30A4(7782); COQ7(10229); PHKB(5257); CYLD(1540);
MARVELD3(91862); GRIN2A(2903); SLC7A6OS(84138); SRR(63826);
SPECC1(92521);

TABLE 4-133

| | | |
|---|---|---|
| | | WSB1(26118); CCDC55(84081); CCL4L1(9560); WIRE(147179); |
| | | AKAP1(8165); ARMC7(79637); NUFIP2(57532); PEX12(5193); |
| | | DDX52(11056); PLXDC1(57125); CDC27(996); HOXB7(3217); |
| | | TRIM65(201292); SFRS2(6427); ANKRD30B(374860; KIAA1328 |
| | | (57536); SLC14A1(6563); RNF165(494470); ZNF24(7572); |
| | | LSM14A(26065); ZFP260(339324); NALP11(204801); C20orf133 |
| | | (140733); STK4(6789); RAB22A(57403); C20orf177(63939); |
| | | LOC284757(284757); CD93(22918); PLAGL2(5326); CHODL |
| | | (140578); SLC5A3(6526); ADARB1(104); ZNF294(26046); GRIK1 |
| | | (2897); HLCS(3141); KDELR3(11015); XG(7499); PHF16(9767); |
| | | RP11-38O23.2(389852); OATL1(4943); SH2D1A(4068); RP6- |
| | | 213H19.1(51765); PHF6(84295); GPM6B(2824); TAB3(257397); |
| | | SMC1L1(8243); RNF12(51132); RP11-130N24.1(340533); RP13- |
| | | 383K5.1(55286); DCX(1641); PCDH11Y(83259); |
| hsa-miR-504 | 3389; 3665; 3666; | SAMD11(148398); PLEKHN1(84069); PUSL1(126789); |
| | | PLA2G2F(64600); LDLRAD2(401944); MTB40(9923); C1orf130 |
| | | (400746); SEPN1(57190); EPB41(2035); MANEAL(149175); |
| | | MPL(4352); MGC33556(339541); SLC6A17(388662); MLLT11 |
| | | (10962); SNX27(81609); S100A7L1(338324); IL6R(3570); |
| | | PRELP(5549); C1orf95(375057); C1orf69(200205); CHD5 |
| | | (26038); KLHL21(9903); CTNNBIP1(56998); MTHFR(4524); |
| | | MYOM3(127294); AK2(204); KIAA0319L(79932); HPCAL4 |
| | | (51440); RIMS3(9783); C1orf123(54987); SORT1(6272); |
| | | RHOC(389); TNRC4(11189); CRABP2(1382); EXOC8(149371); |
| | | AKT3(10000); TRIM54(57159); SLC4A1AP(22950); ATOH8 |
| | | (84913); MRPL30(51263); UGCGL1(56886); FLJ13096(80067); |
| | | CFLAR(8837); HS1BP3(64342); FLJ25084(151516); TFCP2L1 |
| | | (29842); TNS1(7145); ASB18(401036); SLC6A6(6533); ITGA9 |
| | | (3680); CTDSPL(10217); ZNF651(92999); CCBP2(1238); ARIH2 |
| | | (10425); MRAS(22808); THRB(7068); PRKAR2A(5576); RASSF1 |
| | | (11186); C3orf18(51161); BAP1(8314); FOXP1(27086); BDH1 |
| | | (622); MGC21675(92070); WHSC1(7468); TBC1D14(57533); |
| | | LOC285429(285429); KIAA1727(85462); LETM1(3954); |
| | | KIAA1909(153478); PHF15(23338); GALNT10(55568); SEMA5A |
| | | (9037); STK10(6793); SCUBE3(222663); ABCC10(89845); |
| | | PBX2(5089); C6orf125(84300); MDGA1(266727); KCNK5(8645); |
| | | MOCS1(4337); DJ122O8.2(57226); SERAC1(84947); LFNG(3955); |
| | | SLC29A4(222962); POM121(9883); TRRAP(8295); TRIM56 |
| | | (81844); EMID2(136227); EN2(2020); SNX8(29886); TNPO3 |
| | | (23534); ATG9B(285973); CLN8(2055); C8orf30A(51236); |
| | | PSD3(28362); RAB11FIP1(80223); IMPA1(3612); JRK(8629); |
| | | DMRT2(10655); C9orf47(286223); DBH(1621); FAM69B(138311); |
| | | FLJ36268(401563); B4GALT1(2683); SHB(6461); IGFBPL1 |
| | | (347252); FANCC(2176); TRAF1(7185); LHX6(26468); PDCL |
| | | (5082); FAM102A(399665); RAPGEF1(2889); TSC1(7248); |
| | | VAV2(7410); C9orf157( |

TABLE 4-134

| | | |
|---|---|---|
| | | 402381); C9orf37(85026); UBTD1(80019); ZFYVE27(118813); |
| | | ENTPD7(57089); LRRC27(80313); MAT1A(4143); C10orf13 |
| | | (143282); SEC31L2(25956); MRPL43(84545); FAM26C(255022); |
| | | MGC45840(283229); TUB(7275); CCND1(595); TAGLN(6876); |
| | | S1RT3(23410); GPR44(11251); SLC15A3(51296); UNC93B1 |
| | | (81622); LRRC32(2615); LOC283219(283219); PCSK7(9159); |
| | | SCN4B(6330); FKBP4(2288); TMEM16F(196527); FLJ20489 |
| | | (55652); PRPF40B(25766); NAB2(4665); MDM2(4193); APAF1 |
| | | (317); TCF1(6927); TMEM132B(114795); CACNA2D4(93589); |
| | | CDCA3(83461); OACT5(10162); GSG1(83445); FKBP11(51303); |
| | | FMNL3(91010); STAT2(6773); CTDSP2(10106); RAB35(11021); |
| | | C12orf43(64897); CDK2AP1(8099); SCARB1(949); GOLGA3 |
| | | (2802); C14orf92(9878); JDP2(122953); FLRT2(23768); |
| | | TNFAIP2(7127); BTBD7(55727); KLF13(51621); MAP1A(4130); |
| | | SORD(6652); CGNL1(84952); SNX22(79856); SH3PX3(257364); |
| | | ARNT2(9915); IL16(3603); FLJ22795(80154); SCAND2(54581); |
| | | MAN2A2(4122); FLJ43339(388115); PRTG(283659); RGMA(56963); |
| | | RAB40C(57799); UBE2I(7329); CIITA(4261); SBK1(388228); |
| | | PRRT2(112476); HSD3B7(80270); CCL22(6367); FLJ45121 |
| | | (400556); C16orf28(65259); C16orf5(29965); ERN2(10595); |
| | | C16orf54(283897); PLLP(51090); SMPD3(55512); C16orf7 |
| | | (9605); TNFSF12(8742); CHD3(1107); KIAA0672(9912); |
| | | RAB11FIP4(84440); RHBDL3(162494); UNC45B(146862); |
| | | STARD3(10948); G6PC(2538); MGC3123(79089); ABCC3(8714); |
| | | KIAA0195(9772); BAIAP2(10458); PITPNA(5306); NLE1(54475); |
| | | KRTHA5(3886); FLJ31222(388387); C17orf65(339201); ATAD4 |
| | | (79170); RHBDF2(79651); TK1(7083); TMEM105(284186); |
| | | DUS1L(64118); C17or162(79415); CLUL1(27098); RNF165 |
| | | (494470); DOK6(220164); COLEC12(81035); ENOSF1(55556); |
| | | BCL2(596); M8P(4155); MUM1(84939); ALKBH7(84266); |
| | | ARHGEF18(23370); RAB8A(4218); APOE(348); PRMT1(3276); |
| | | POLR2E(5434); ZBTB7A(51341); LRG1(116844); RANBP3(8498); |
| | | MGC2747(79086); ELL(8178); LASS1(10715); GMIP(51291); |
| | | KIAA1559(57677); POU2F2(5452); FLJ10781(55228); A1BG(1); |
| | | SOX12(6666); C20orf160(140706); ASXL1(171023); MMP24 |
| | | (10893); LPIN3(64900); KCNK15(60598); PTPN1(5770); |
| | | GGTL3(2686); ZHX3(23051); PTPRT(11122); ACOT8(10005); |
| | | CHRNA4(1137); BTBD4(140685); ICOSLG(23308); POFUT2 |
| | | (23275); ADRBK2(157); NF2(4771); APOL6(80830); |
| | | MAP3K71P1(10454); CECR6(27439); HTF9C(27037); |
| | | YPEL1(29799); LIF(3976); KIAA1904(114794); UNC84B |
| | | (25777); TOB2(10766); PCTK1(5127); OTUD5(55593); |
| | | ZDHHC9(51114); GPC4(2239); |
| hsa-miR-506 | 3390; 3667; 3668; 3669; 3670; | VAMP3(9341); H6PD(9563); FBLIM1(54751); SERINC2(347735); |
| | 3732; 3733; 3734; 3735; 3736; | ZYG11B(79699); LEPROT(54741); SH3GLB1(51100); PTBP2 |
| | 3737; | (58155); SLC30A7(148867); GNAI3(2773); ATP1A1(476); |
| | | NBPF15(284 |

TABLE 4-135
565); ZNF687(57592); IL6R(3570); DDR2(4921); TBX19(9095);
PRRX1(5396); QSCN6(5768); LAMC1(3915); C1orf21(81563); ELF3
(1999); PPP1R12B(4660); RASSF5(83593); RP1-286D6.4(9731);
PADI2(11240); WNT4(54361); SLC30A2(7780); FABP3(2170); CC2D1B
(200014); EVI5(7813); TRIM45(80263); NBPF11(200030); PEX19
(5824); KIAA0040(9674); C1orf24(116496); C1orf116(79098);
ENAH(55740); TARBP1(6894); NID1(4811); HNRPU(3192); TTC7A
(57217); ANTXR1(84168); LOC339745(339745); FLJ38973(205327);
CTDSP1(58190); RNPEPL1(57140); ING5(84289); CYS1(192668);
SERTAD2(9792); FLJ90024(129303); FLJ10996(54520); SCN7A
(6332); RAPH1(65059); COL4A4(1286); EDEM1(9695); MKRN2
(23609); Corf19(51244); LIMD1(8994); BSN(8927); PARP14
(54625); KLHL24(54800); K1AA1143(57456); LTF(4057);
C3orf62(375341); IL17RD(54756); FLJ34969(201627); MAGI1
(9223); LMOD3(56203); MINA(84864); FSTL1(11167); KLF15
(28999); SERP1(27230); CLDN1(9076); KIAA1530(57654);
FLJ37478(339983); LOC345222(346222); AFF1(4299);
FLJ20032(54790); FLJ20273(54502); AGXT2L1(64850);
C4orf13(84068); SMAD5(4090); G3BP(10146); GALNT10
(56568); LOC153222(153222); SEMA5A(9037); PLCXD3(345557);
ADAMTS6(11174); SLCO4C1(353189); SEMA6A(57656); MARCH3
(115123); ZNF192(7745); HLA-E(3133); PIM1(5292); DAAM2
(23500); LRRC1(55227); ANKRD6(22881); C6orf182(285753);
C6orf72(116254); QKI(9444); TRAM2(9697); SLC17A5(26503);
COL12A1(1303); SYNCRIP(10492); CD164(8763); STX7(8417);
LOC202459(202459); IQ0E(23288), RCP9(27297); MDFIC(29969);
LOC136263(136263); SNX8(29886); CAMK2B(816); CDK6(1021);
LRCH4(4034); CREB3L2(64764); SLC7A2(6542); SLC25A37(51312);
CPNE3(8895); PPP1R3B(79660); KIF13B(23303); RAB11FIP1(80223);
SNAI2(6591); SNX16(64089); PLEC1(5339); C9orf47(286223);
FPGS(2356); C9orf58(83543); ARRDC1(92714); B4GALT1(2683);
KIAA1161(57462); ANKS6(203286); ROD1(9991); PHF19(26147);
C9orf88(64855); NCOA4(8031); TSPAN15(23555); EIF4EBP2(1979);
TMEM20(159371); ITGB1(3688); C10orf72(196740); SH3PXD2A
(9644); GPAM(57678); PPFIBP2(8495); TUB(7275); C11orf17
(56672); TEAD1(7003); QSER1(79832); CTNND1(1500); CAPN1(823);
FKSG44(83786); OVOL1(5017); LOC399947(399947); UBE4A(9354);
CBL(867); OAF(220323); STT3A(3703); RHOG(391); COPB(1315);
TRAF6(7189); VPS37C(55048); RAB3IL1(5866); ORAOV1(220064);
SHANK2(22941); GAB2(9846); FLJ38159(220388); FZD4(8322);
C11orf45(219833); TMEM16F(196527); NR4A1(3164); ERBB3(2065);
RBMS2(5939); KCNMB4(27345); TXNRD1(7296); RFX4(5992); USP30
(84749); OGFOD2(79676); SCNN1A(6337); PRICKLE1(144165);
VDR(7421); RARG(5916); ITGA7(3679); KIAA0286(233

TABLE 4-136

| | | |
|---|---|---|
| | | 06); OSBPL8(114882); FLJ20674(54621); SLC7A1(6541); |
| | | KIAA1008(22894); SLITRK6(84189); COL4A1(1282); MGC40069 |
| | | (348035); KIAA0247(9766); PSEN1(5663); YY1(7528); TRAF3 |
| | | (7187); KIAA0125(9834); SIX4(51804); BCL11B(64919); SORD |
| | | (6652); RAB11A(8766); ZSCAN2(54993); AKAP13(11214); |
| | | IQGAP1(8826); UBE3A(7337); BMF(90427); RAB27A(5873); |
| | | PRTG(283659); SCAMP2(10066); LOC400451(400451); PRRT2 |
| | | (112476); GPT2(84706); FLJ38101(255919); PSKH1(5681); |
| | | SNTB2(6645); NFAT5(10725); TXNDC11(51061); FLJ11151 |
| | | (55313); XYLT1(64131); GGA2(23062); CNOT1(23019); CMTM4 |
| | | (146223); RANBP10(57610); PCOLN3(5119); GARNL4(23108); |
| | | ASPA(443); MED9(55090); CPD(1362); WIRE(147179); ITGB3 |
| | | (3690); PNPO(55163); ABCC3(8714); TMEM49(81671); TMEM104 |
| | | (54868); CBX2(84733); C17orf27(57674); METT10D(79066); |
| | | CARKL(23729); FXR2(9513); C17orf76(388341); FLOT2(2319); |
| | | MYO1D(4642); VAT1(10493); DUSP3(1845); UBE2O(63893); |
| | | TBC1D16(125058); ARHGAP28(79822); TWSG1(57045); MIB1 |
| | | (57534); SMAD4(4089); NFATC1(4772); NFIX(4784); MGC3207 |
| | | (84245); APOE(348); HKR2(342945); KIAA0963(22904); RAB3D |
| | | (9545); CEBPA(1050); VISA(57506); CDH4(1002); RBL1(5933); |
| | | ZHX3(23051); SPINLW1(57119); NFATC2(4773); DIDO1(11083); |
| | | SLC5A3(6526); CLIC6(54102); TMEM1(7109); RIPK4(54101); |
| | | SNF1LK(150094); SNAP29(9342); CRKL(1399); MGC3731(79159); |
| | | TNRC6B(23112); PPARA(5465); LIF(3976); DDX3X(1654); |
| | | ATP7A(538); RP1-32F7.2(286499); CXorf39(139231); PLXNA3 |
| | | (55558); SPRY3(10251); IL9R(3581); RP11~217H1.1(84061); |
| | | NXF5(55998); |
| hsa-miR-507 | 3391; 3671; 3672; 3673; 3674; | NSUN4(387338); TMEM56(148534); CD1D(912); C1orf21 |
| | | (81563); PPP1R12B(4660); PROX1(5629); C1orf126(200197); |
| | | AGMAT(79814); KIAA0319L(79932); MTF1(4520); FCRL3(115352); |
| | | RBBP5(5929); DUSP10(11221); PPP1CB(5500); PRKCE(5581); |
| | | STEAP3(55240); CCNT2(905); RAB3GAP1(22930); KCNJ3(3760); |
| | | FLJ44048(401024); ADAM17(6868); BCL11A(53335); FLJ10996 |
| | | (54520); MGC4268(83607); SCN3A(6328); SCN1A(6323); |
| | | ALS2(57679); RAPH1(65059); ERBB4(2066); MKRN2(23609); |
| | | RBMS3(27303); GPD1L(23171); OXSR1(9943); SLC25A26 |
| | | (115286); NUDT16(131870); FNDC3B(64778); OXTR(5021); |
| | | LOC401052(401052); SLC4A7(9497); CAST1(26059); MAGI1 |
| | | (9223); ZNF80(7634); STK32B(55351); MOBKL1A(92597); |
| | | PHF17(79960); SLC25A4(291); GABRA4(2557); LEF1(51176); |
| | | CBR4(84869); SORBS2(8470); FAM105B(90268); SFRS12 |
| | | (140890); TNPO1(3842); CAMK4(814); MYOZ3(91977); |
| | | PRLR(5618); PDE4D(5144); MGC23909(153339); PJA2(9867); |
| | | 2NF192(7745); ARID1B(57492); QKI(9444); BACH2(60468); |
| | | SIM1(6492); REV3L(5980); OLIG3(167826); PDE10A(10846); |
| | | Ells1(222166); ZKSCAN1(7586); MKLN1(4289); LOC401357 |
| | | (401357); CDK6(1021); P |

TABLE 4-137

| | | |
|---|---|---|
| | | DAP1(11333); FLJ36031(168455); COG5(10466); RIMS2(9699); |
| | | PF20L1(51105); CNOT7(29883); IMPAD1(54928); REXO1L1 |
| | | (254958); TMEM64(169200); DMRT2(10655); NTRK2(4915); |
| | | MCART1(92014); SHB(6461); ALAD(210); ZYG11BL(10444); |
| | | CXXC6(80312); SEC24C(9632); ITIH5(80760); HERC4(26091); |
| | | USP47(55031); TEAD1(7003); GTF2H1(2965); AMOTL1(154810); |
| | | SLC1A2(6506); LTBP3(4054); CCND2(894); MSRB3(253827); |
| | | BCL7A(605); TMEM132B(114795); RAD52(5893); B4GALNT1(2583); |
| | | MGC9850(219404); RP11-50D16.3(387921); XPO4(64328); |
| | | FLJ13639(79758); PCDH9(5101); YY1(7528); MAMDC1(161357); |
| | | WDR22(8816); EIF3S1(8669); KIAA0256(9728); TRAF7(84231); |
| | | C16orf28(65259); MGC19764(162394); CNP(1267); RPS6KB1 |
| | | (6198); FLJ36492(284047); PLXDC1(57125); TBC1D16(125058); |
| | | VAPA(9218); DTNA(1837); DSC2(1824); TCEB3C(162699); |
| | | RNF152(220441); CRX(1406); ZNF471(57573); INSR(3643); |
| | | ZNF562(54811); BRD4(23476); ATRN(8455); RAB22A(57403); |
| | | ADRA1D(146); SLC5A3(6526); CRYZL1(9946); KDELR3(11015); |
| | | PPARA(5465); OSM(5008); CLCN4(1183); BIRC4(331); DDX26B |
| | | (203522); CXorf38(159013); OPHN1(4983); RP11-130N24.1 |
| | | (340533); PCDH19(57526); |
| hsa-miR-508 | 3392; 3675; 3676; | PDIK1L(149420); TTF2(8458); FAM20B(9917); XPR1 |
| | | (9213); EDARADD(128178); ENAH(55740); RHOQ(23483); INPP4A |
| | | (3631); SULT1C2(27233); RHBDD1(84236); HRB(3267); CLASP1 |
| | | (23332); ORC4L(5000); COL5A2(1290); ARL4C(10123); BSN |
| | | (8927); SKIL(6498); SATB1(6304); MUC4(4585); C3orf34 |
| | | (84984); MGC21675(92070); HIP2(3093); GNRHR(2798); |
| | | FLJ23191(79625); SUB1(10923); PLCXD3(345557); LHFPL2 |
| | | (10184); KIAA1919(91749); MYCT1(80177); SLC22A3(6581); |
| | | PGM3(5238); CLDN12(9069); ZNF705CP(389631); WHSC1L1 |
| | | (54904); AKNA(80709); KIAA1600(57700); ZNF25(219749); |
| | | RP11-142I17.1(26095); KCNMA1(3778); FLJ10726(55216); |
| | | ARHGEF12(23365); STS-1(84959); APAF1(317); DENR(8562); |
| | | RAD52(5893); KRAS(3845); DZIP1(22873); KIAA2010(55671); |
| | | LOC440295(440295); MYEF2(50804); MYO5A(4644); NEDD4 |
| | | (4734); CYLD(1540); VAPA(9218); DNAJB1(3337); SLC5A3 |
| | | (6526); ARSF(416); SLC6A14(11254); LOC203427(203427); |
| | | DYNLT3(6990); |
| hsa-miR-511 | 3393; | PPP1R12B(4660); DAB1(1600); TMED5(50999); C1orf24 |
| | | (116496); PTPN14(5784); IRF2BP2(359948); CHML(1122); |
| | | ACTR3(10096); LOC339745(339745); FLJ38973(205327); |
| | | EIF2AK2(5610); SERTAD2(9792); PAX8(7849); ORC4L(5000); |
| | | PLA2R1(22925); SATB2(23314); ERBB4(2066); COL4A4(1286); |
| | | SLC6A6(6533); RBMS3(27303); NKTR(4820); CCR5(1234); |
| | | RBM15B(29890); PTPRG(5793); IGSF4D(253559); ALCAM(214); |
| | | EIF2A(83939); RYBP(23429); DCK(1633); BMPR1B(658); |
| | | ELMOD2(255520); TMEM34(55751); LDB2(9079); MLR1(254251); |
| | | GABRA4(2557); FLJ90650(206338); FL |

TABLE 4-138

| | | |
|---|---|---|
| | | J37562(134553); WDR55(54853); PCDH39(56127); SGCD |
| | | (6444); RPL37(6167); RUNX2(860); QKI(9444); BACH2 |
| | | (60468); GOPC(57120); LANCL2(55915); CD36(948); |
| | | ADAM22(53616); ING3(54556); FLJ11000(55281); PMS2L2 |
| | | (5380); LRRC4(64101); CNOT4(4850); KIAA0738(9747); |
| | | PAG1(55824); FBXO32(114907); MTAP(4507); NTRK2 |
| | | (4915); FREM1(158326); ABO(28); EIF4EBP2(1979); |
| | | ENTPD7(57089); MXI1(4601); ACADSB(36); PARD3(56288); |
| | | DKFZp686O24166(374383); ELP4(26610); MRPL49(740); |
| | | SC5DL(6309); SLC1A2(6506); FADS1(3992); DLG2(1740); |
| | | CTSC(1075); PTPRO(5800); LOC389634(389634); FGF9 |
| | | (2254); ARL11(115761); FLJ10769(55739); FLJ25477 |
| | | (219287); LOC283487(283487); NRKN3(9369); SNX22 |
| | | (79856); ALPK3(57538); RFXDC2(64864); NOPE(57722); |
| | | XYLT1(64131); RBM35B(80004); LOC654780(654780); |
| | | MYOCD(93649); IGF2BP1(10642); CROP(51747); FLJ36492 |
| | | (284047); PLXDC1(57125); BRCA1(672); C18orf14(79839); |
| | | ZNF226(7769); ZNF480(147657); ZNF562(54811); ELAV3 |
| | | (1995); MGC71805(403113); THAP8(199745); RAB22A |
| | | (57403); ADAM33(80332); ABCC13(150000); ERG(2078); |
| | | SH2D1A(4068); ATRX(546); ZMAT1(84460); |
| hsa-miR-512-3p | 3394; 3677; 3739; 3740; | SAMD11(148398); H6PD(9568); NPAL3(57185); PRPF38A |
| | | (84950); ZYG11B(79699); ATF6(22926); PPP1R12B(4660); |
| | | FLVCR(28982); C1orf69(200205); DISC1(27185); TR1M58 |
| | | (25893) HES2(54626); DFFA(1676); KIAA0319L(79932); |
| | | STK40(83931); RAB3B(5865); RSBN1(54665); ISG20L2 |
| | | (81875); FLJ14397(84865); RNF149(284996); FLJ16008 |
| | | (339761); GPR155(151556); ITGA9(3680); THRB(7068); |
| | | LRRC2(79442); PRKAR2A(5576); WDR5B(54554); MGC40579 |
| | | (256356); WHSC1(7468); EVC(2121); FLJ35725(152992); |
| | | USP46(64854); LOC152485(152485); KIAA1909(153478); |
| | | FLJ25680(134187); FLT4(2324); C6orf69(222658); |
| | | C6orf71(389434); NUDT3(11165); EPM2A(7957); VKORC1L1 |
| | | (154807); GATAD1(57798); ZKSCAN1(7586); FKBP14(55033); |
| | | TMED4(222068); PURB(5814); CALN1(83698); HIP1(3092); |
| | | RABL5(64792); CREB3L2(64764); FAM62B(57488); CLN8 |
| | | (2055); SLC25A37(51312); FGFR1(2260); REXO1L1(254958); |
| | | C9orf47(286223); C9orf28(89853); DHTKD1(55526); ARL5B |
| | | (221079); CUBN(8029); C10orf72(196740); POLR3A(11128); |
| | | FAM26C(255022); SPRN(503542); C11orf1(64776); SC5DL |
| | | (6309); SYVN1(84447); SPTBN2(6712); hCAP-D3(23310); |
| | | ERBB3(2065); GTF2H3(2967); CBX5(23468); CPM(1368); |
| | | SBNO1(55206); C14orf153(84334); SYNJ2BP(55333); TPM1 |
| | | (7168); CRAMP1L(57585); ZNF213(7760); NFATC21P(84901); |
| | | SPN(6693); NFATC3(4775); MARVELD3(91862); AFG3L1(172); |
| | | LOC654780(654780); PRR11(55771); DHX40(79665); SSTR2 |
| | | (6752); TOP3A(7156); RAD51L3(5892); GJA7(10052); |
| | | TBC1D16(125058); CSNK1D(1453); RNF165(494470); |
| | | TNFAIP8L1(126282); F2RL3(9002); ZNF431(170959); SPI |

TABLE 4-139

| | | |
|---|---|---|
| | | B(6689); SFES14(10147); KIAA1559(57677); OPA3(80207); |
| | | ZFPL(162967); C20orf121(79183); TUBB1(81027)l PTGIS |
| | | (5740); ADAMTS5(11096); LOC63929(63929); PPARA(5465); |
| | | NPTXR(23467); BIRC4(331); PRKX(5613); CXorf38(159013); |
| | | PRKY(5616); |
| hsa-miR-527 | 3395; | RAP1A(5906); VANGL1(81839); SYT11(23208); FAM20B |
| | | (9917); CEP350(9857); SLC35D1(23169); PAP2D(163404); |
| | | AMIGO1(57463); GLT25D2(23127); LPIN1(23175); ACVR1(90); |
| | | CERKL(375298); USP37(57695); HRH1(3269); RAP2B(5912); |
| | | WHSC1(7468); SLC7A11(23657); SETD7(80854); OTUD4(54726); |
| | | TNPO1(3842); G3BP(10146); FOXO3A(2309); ATXN1(6310); |
| | | AGPAT4(56895); PDE10A(10846); LFNG(3955); FOXK1(221937); |
| | | SLC25A37(51312); PSD3(23362); KIAA0367(23273); BICD2 |
| | | (23299); FBXW2(26190); TEAD1(7003); KIAA1377(57562); |
| | | FZD4(8322); SESN3(143686); C11orf45(219833); RBMS2(5939); |
| | | CHST11(50515); PPTC7(160760); AKAP11(11215); FLJ25477 |
| | | (219237); KLF12(11278); C14orf35(122830); NOVA1(4857); |
| | | EXOC5(10640); PRTG(283659); FAM100A(124402); AP1GBP1 |
| | | (11276); HELZ(9931); C18orf1(753); MIB1(57534); STK4 |
| | | (6789); TNRC6B(23112); RBM9(23543); AFF2(2334); DAZ2 |
| | | (57055); |
| hsa-miR-5623 | 396; 3678; | NMNAT1(64802); KIF1B(23095); RBBP4(5928); MANEAL |
| | | (149175); CTH(1491); FAM73A(374986); TMEM56(148534); PTGFRN |
| | | (5738); POGK(57645); DFFA(1676); GCLM(2730); DBT(1629); |
| | | ST7L(54879); TSPAN2(10100); ISG20L2(81875); CD84(8832); |
| | | ARPC5(10092); ZBTB41(360023); USH2A(7399); AKT3(10000); |
| | | PCYOX1(51449); FLJ20758(55037); C2orf26(65124); ABI2 |
| | | (10152); LOC116143(116143); RNF149(284996); NPHP1(4867); |
| | | C2orf19(394261); EDEM1(9695); PTPRG(5793); C3orf58(205428); |
| | | KCNMB2(10242); AZI2(64343); CLASP2(23122); SCN11A(11280); |
| | | CDCP1(64866); CCDC71(64925); C3orf62(375341); MINA(84864); |
| | | FLJ44076(401080); TFDP2(7029); EIF5A2(56648); GP5(2814); |
| | | CENTB2(23527); KLB(152831); REST(5978); ENAM(10117); APBB2 |
| | | (323); ASAHL(27163); MAP2K1IP1(8649); MAP1B(4131); RNF14 |
| | | (9604); OXCT1(5019); MCC(4163); KIF3A(11127); KLHL3(26249); |
| | | RPS14(6208); SIRT5(23408); FAM8A1(51439); C6orf182(285753); |
| | | LOC619208(619208); NUDT3(11165); USP49(25862); DJ122O8.2 |
| | | (57226); MAFK(7975);NFE2L3(9603); ZNRF2(223082); ZKSCAN1 |
| | | (7586); SCAP2(8935); TMED4(222068); PURB(5814); PDAP1 |
| | | (11333); FLJ13576(64418); SLC35B4(84912); SPFH2(11160); |
| | | PI15(51050);GSR(2936); UBE2R2(54926); NTRK2(4915); MAK10 |
| | | (60560); C9orf47(286223); PTPDC1(138639); PAPPA(5069); |
| | | ZNF297B(23099); KIAA0367(23273); EPB41L4B(54566); |
| | | CCBL1(883); RP11-162I21.1(340843); ZNF365(22891); |
| | | ENTPD7(57089); C10orf77(79847); ITIH5(80760); CSTF2T |
| | | (23283); MAWBP(64081); C10orf13(143282); NOC3L(6431 |

TABLE 4-140

| | | |
|---|---|---|
| | | 8); TMEM10(93377); C10orf46(143384); BNIP3(664); |
| | | TMEM16C(63982); STX3A(6809); DLAT(1737); SPTY2D1 |
| | | (144108); FLJ12529(79869); SPTBN2(6712); GAB2(9846); |
| | | FZD4(8322); KIAA1467(57613); SLC16A7(9194); THAP2 |
| | | (83591); ATP2A2(488); SLC2A3(6515); AICDA(57379); |
| | | DEPDC4(120863); CORO1C(23603); SSH1(54434); ZNF605 |
| | | (90462); RP11-54H7.1(23026); UBL3(5412); KATNAL1 |
| | | (84056); CG018(90634); RNF31(55072); INSM2(84684); |
| | | PPP2R5C(5527); EGLN3(112399); MAX(4149); SYNJ2BP |
| | | (55333); SPTLC2(9517); SORD(6652); RAB11A(8766); |
| | | ALPK3(57538); UBE3A(7337); LRRC57(255252); MYEF2 |
| | | (50804); NARG2(79664); MGC2654(79091); SNN(8803); |
| | | SPN(6693); NFAT5(10725); KIAA1970(124454); Pfs2 |
| | | (51659); WSB1(26118); PRR11(55771); WDR68(10238); |
| | | SSTR2(6752); KIAA1618(57714); PTRF(284119); GJA7 |
| | | (10052); SPAG9(9043); HELZ(9931); GNAL(2774); |
| | | FVT1(2531); TNFAIP8L1(126282); RAB8A(4218); PLAC2 |
| | | (257000); OPA3(80207); ZNF160(90338); SNX5(27131); |
| | | CRNKL1(51340); ATP9A(10079); SLC5A3(6526); NRIP1 |
| | | (8204); PPARA(5465); GTSE1(51512); ZBED4(9889); |
| | | LOC128977(128977); MAPK1(5594); CXorf15(55787); |
| | | RNF12(51132); CHM(1121); LAMP2(3920); |
| hsa-miR-567 | 3397; | SAMD11(148898); C1orf84(149469); PRPF38A(84950); |
| | | FAM102B(284611); RALGPS2(55103); MARK1(4139); |
| | | C1orf121(51029); PUM1(9698); SYNC1(81493); AGBL4 |
| | | (84871); SERBP1(26135); EV15(7813); YOD1(55432); |
| | | TOMM20(9804); CHML(1122); AKT3(10000); PPIG(9360); |
| | | ZNF650(130507); KIAA1212(55704); TBC1D8(11138); |
| | | WDR33(55339); TTN(7273); SESTD1(91404); MOBP(4336); |
| | | ALCAM(214); SELT(51714); KCNAB1(7881); SMARCC1 |
| | | (6599); AER61(285203); C8orf59(151963); FGFRL1 |
| | | (53834); FLJ20032(54790); GAB1(2549); TMEM34(55751); |
| | | DNAJB14(79982); MGC33302(256471); CCT5(22948); SKP2 |
| | | (6502); LOC285636(285636); TNPO1(3842); RASA1(5921); |
| | | GM2A(2760); HCN1(348980); LIX1(167410); CSF1R(1436); |
| | | GABRB2(2561); LIN28B(389421); C6orf97(80129); CCR6 |
| | | (1235); TXNDC5(81567); C6orf84(22832); C6orf54(26236); |
| | | STEAP2(261729); PRKAR2B(5577); SAMD9(54809); AGPAT5 |
| | | (55326); TMEM70(54968); OXR1(55074); NTRK2(4915); |
| | | NCBP1(4686); GPR107(57720); RBM18(92400); BTAF1(9044); |
| | | CASC2(255082); TMEM23(259230); CCDC6(8030); COX15 |
| | | (1355); GPAM(57678); KIAA1914(84632); RAB11FIP2 |
| | | (22841); PARVA(55742); MLSTD2(84188); PUT4(2526); |
| | | RBM7(10179); UBE4A(9354); SLCIA2(6506); CDON(50937); |
| | | C12orf59(120939); TSPAN31(6302); THAP2(83591); |
| | | C12orf29(91298); NUDT4(11163); OLR1(4973); ERGIC2 |
| | | (51290); MGC24039(160518); CBX5(23468); CDK8(1024); |
| | | APRIN(23047); UFM1(51569); PCNX(22990); TRAPPC6B |
| | | (122553); NID2(22795); KIAA0831(22863); TRMT5 |
| | | (57570); AP4E1(23431); DKFZp666G0 |

TABLE 4-141

| | | |
|---|---|---|
| | | 57(283726); BMF(90427); CRKRS(51755); ANKFY1(51479); |
| | | MIB1(57534); SMAD4(4089); SS18(6760); OR7D2(162998); |
| | | DIRAS1(148252); ZNF100(163227); PTPRT(11122); ADAMTS5 |
| | | (11096); GK(2710); OGT(8473); ATP1B4(23439); EDA2R |
| | | (60401); OPHN1(4983); TAF9B(51616); |
| hsa-miR-589 | 3398; | DDR2(4921); RERE(473); FUSIP1(10772); KIAA0319L |
| | | (79932); FCRL5(83416); TOMM20(9804); ACTR3(10096); |
| | | CYP26B1(56603); REEP1(65055); FLJ10996(54520); RAPH1 |
| | | (65059); TNS1(7145); TRIP12(9320); MOBP(4336);CCR9 |
| | | (10803); ADIPOQ(9370); ZCSL2(285381); ZNF445(353274); |
| | | PRICKLE2(166336); TMCC1(23023); WHSC1(7468); SEMA5A |
| | | (9037); MTX3(345778); MCC(4163); SLC25A27(9481); TPBG |
| | | (7162); C6orf68(116150); TSPYL1(7259); SEMA3E(9723); |
| | | CDK6(1021); UBE2H(7328); TSPYL5(85453); NTRK2(4915); |
| | | C9orf47(286223); FSD1CL(405752); FBXW2(26190); CUGBP2 |
| | | (10659); C10orf72(196740); CPEB3(22849); GPIAP1(4076); |
| | | ATM(472); NXF1(10482); RFX4(5992); CBX5(23468); CS |
| | | (1431); GIT2(9815); GOLGA3(2802); HS6ST3(266722); |
| | | ARHGEF7(8874); KLF12(11278); SLC39A9(55334); MAP3K9 |
| | | (4293); C14orf103(55102); GOLGA8E(390535); GOLGA8G |
| | | (283768); KIAA1018(22909); 76P(27229); SCAMP5(192683); |
| | | NIPA1(123606); SMG1(23049); ZNF694(342357); NMT1(4836); |
| | | CROP(51747); WDR68(10238); AP1GBP1(11276); ARHGAP27 |
| | | (201176); ZNF652(22834); ERN1(2081); ACOX1(51); MXRA7 |
| | | (439921); DTNA(1837); SMAD4(4089); MBP(4155); ZNF585A |
| | | (199704); PTPRT(11122); SLC5A3(6526); BRWD1(54014); |
| | | BCL2L13(23786); TNRC6B(23112); |
| hsa-miR-597 | 3399; 3679; | PFKFB2(5208); C1orf95(375057); HES2(54626); PLA2G2D |
| | | (26279); MYCHP(26292); KIAA0040(9674); GPD2(2820); |
| | | RNASEH1(246243); FLJ34931(388939); RBM15B(29890); |
| | | PLXNA1(5361); CHRD(8646); PRKAR2A(5576); CD47(961); |
| | | WHSC1(7468); PCDH7(5099); TMEM33(55161); ADAM29 |
| | | (11086); SLC25A4(291); WDFY3(23001); HMP19(51617); |
| | | MAML1(9794); TPPP(11076); PRLR(5618); PLCXD3(345557); |
| | | GJB7(375519); PIP3-E(26034); PDE10A(10846); IQCE(23288); |
| | | G10(8896); ZNF12(7559); TNKS(8658); FAM86B1(85002); |
| | | PTGS1(5742); TSC1(7248); TLX1(3195); SLC18A2(6571); |
| | | FAM26C(265022); ADAM12(8038); MK167(4288); IPO07(10527); |
| | | PACS1(55690); SSH3(54961); SNF1LK2(23235); LOH11CR2A |
| | | (4013); FBXO3(26273); KIAA0286(23306); B4GALNT1(2583); |
| | | TTC8(123016); SLC24A4(123041); BCL11B(64919); FLJ39531 |
| | | (400360); LOC440295(440295); MAN2A2(4122); TTBK2(146057); |
| | | C15orf17(57184); KIAA0513(9764); FLJ20186(54849); FLJ11151 |
| | | (55313); THRA(7067); HEXDC(284004); SLC6A4(6532); HELZ |
| | | (9931); SGSH(6448); FHOD3(80206); MBP(4156); P2RY11(5032); |
| | | ZNF507(22847); ZBTB7A(51341); C20orf121(79183); SLC5A3 |
| | | (6526);L OC388886( |

TABLE 4-142

| | | |
|---|---|---|
| hsa-miR-605 | 3400; 3680; | 388886); CLCN5(1184); PRKX(5613); ZDHHC15(158866); |
| | | EPB41(2035); NSUN4(387338); BTF3L4(91408); PTGFRN(5738); |
| | | TUFT1(7286); FCGR2B(2213); ATF6(22926); UHMK1(127933); |
| | | TOR1AIP1(26092); PFKFB2(5208); ICMT(23463); ALDH4A1(8659); |
| | | TTMB(399474); PIK3R3(8503); DAB1(1600); RORC(6097); |
| | | SYT2(127833); IRF6(3664(WDR26(80232); ENAH(55740); |
| | | RNF144(9781); GREB1(9687); UBXD4(165324); SLC30A6(55676); |
| | | RHOQ(23433); ACTR2(10097); ANTXR1(84168); MAP4K4(9448); |
| | | MGC5509(79074); TSN(7247); NRP2(8828); CREB1(1385); |
| | | LOC129607(129607); RAB1A(5861); SPRED2(200734); HS6ST1(9394); |
| | | STAM2(10254); PTD004(29789); TRAK2(66008); FLJ43879(401039); |
| | | NR1D2(9975); GPD1L(23171); DLEC1(9940); TRAK1(22906); |
| | | FAM55C(91775); ZDHHC23(254887); ACAD9(28976); RLP32(6161); |
| | | SH3BP5(9467); THRB(7068); PRKAR2A(5576); MAGI1(9223); |
| | | EIF4E3(317649); VGLL3(389136); DCBLD2(131566); CD47(961); |
| | | TMCC1(23023); MGC40579(256356); WHSC1(7468); RUFY3(22902); |
| | | FRAS1(80144); METAP1(23173); CLCN3(1182); STOX2(56977); |
| | | CLOCK(9575); UGT2B15(7366); FAM13A1(10144); ANKRD50(57182); |
| | | SLC7A11(23657); TBC1D9(23158); MFAP3L(9848); MTRR(4552); |
| | | NLN(57486); LOC153561(153561); MAP1B(4131); SCAMP1(9522); |
| | | CAST(831); LOC90355(90455); NDST1(3340); P18SRP(285672); |
| | | ENC1(8507); LIX1(167410); TPBG(7162); PHACTR2(9749); |
| | | PLG(5340); QKI(9444); atxn1(6310); TRAM2(9697); ATG5(9474); |
| | | SEC63(11231); ARHGAP18(93663); PDCD2(5134); FOXK1(221937); |
| | | SVH(83787); CENTG3(116988); ETV1(2115); CDK6(1021); |
| | | FAM3C(10447); GCC1(79571); MTPN(136319); KIAA0738(9747); |
| | | MTMR9(66036); ZNF705CP(389631); LZTS1(11178); IMPAD1(54928); |
| | | RUNX1T1(862); TMEM65(157378); PAPPA(5069); ZNF297B(23099); |
| | | C9orf100(84904); TRIM14(9830); GABBR2(9568); C9orf5(23731); |
| | | ROD1(9991); ABO(28); QSCN6L1(169714); DHTKD1(55526); |
| | | HSPA14(51182); HECTD2(143279); SCD(6319); GPR26(2849); |
| | | SFMBT2(57713); C10orf72(196740); POLR3A(11128); IPO7(10527); |
| | | PDE3B(5140); TMEM16C(63982); STX3A(6809); NPAS4(266743); |
| | | AMOTL1(154810); PAFAH1B2(5049); ARHGEF12(23365); FLI1(2313); |
| | | MRPL17(63875); LTBP3(4054); FCHSD2(9873); FZD4(8322); |
| | | NPAT(4863); POU2AF1(5450); IGSF4(23705); GAVARAPL1(23710); |
| | | ETV6(2120); REP15(387849); MGC50559(254013); FLJ20489(55652); |
| | | SLC16A7(9194); DYRK2(8445); LGR5(8549); KIAA1853(84530); |
| | | KIAA0152(9761); BRI3BP(140707); TMEM132B(114795); |
| | | JARID1A(5927); KRAS(3845); ZNF641(121274); FAIM2(23017); |
| | | CBX5(23468); SMARCC2(6601); MRP63(78988); ATP8A2(51761); |
| | | ARHGEF7(8874); RP11-5G9.1(160857); KIAA1333(55632); |
| | | C14orf111(15077); FLRT2(23768); OTUB2(78980); TRAF3(7187); |
| | | GCH1(2643) |

TABLE 4-143

| | | |
|---|---|---|
| | | ;TMED10(10972); C14orf1(11161); AQP9(366); IL16(3603); |
| | | AKAP13(11214); ST8SIA2(8128); LRRK1(79705); UBE3A(7337); |
| | | SUHW4(54816); CSNK1G1(53944); KIAA0251(23042); MGC13024(93129); |
| | | CCL22(6367); C16orf5(29965); MIR16(51573); USP31(57478); |
| | | CMTM4(146223); ATBF1(463); ZCCHC14(23174); RPA1(6117); |
| | | CPD(1362); GOSR1(9527); DKFZp667M2411(147172); DHX8(1659); |
| | | ITGB3(3690) ;MYST2(11143); CROP(51747); PCTP(58488); ZZEF1(23140); |
| | | NALP1(22861); SLC4A1(6521); KIAA0553(23181); SPOP(8405); |
| | | MRPL27(51264); SPAG9(9043); TEX2(55852); TK1(7083); |
| | | TBC1D16(125058); RAB12(201475); ANKRD30B(374860); RNF138(51444); |
| | | DSC2(1824); PDE4A(5141); LDLR(3949); PLEKHG2(64857); SPIB(6689); |
| | | ZNF304(57343); FUT5(2527); MGC19604(112812); DFYZp686I1569(400720); |
| | | PTPNS1(140885); VAPB(9217); CD93(22918); GGTL3(2686); |
| | | PREX1(57580); CABLES2(81928); RUNX1(861); BRWD1(54014); |
| | | PLAC4(191585); C21orf29(54084); POFUT2(23275); |
| | | CTB-1048E9.5(402055); CABP7(164633); H1F0(3005); TNRC6B(23112); |
| | | C22orf9(23313); CXorf15(55787); CNKSR2(22866); ARAF(369); |
| | | ZC3H12B(340554); PCDH11X(27328); PHF8(23133); RP11-130N24.1(340533); |
| | | RP11-217H1.1(84061); CHM(1121); AMMECR1(9949); PCDH11Y(83259); |
| hsa-miR-619 | 3401; | PLA2G2F(64600); KLF17(128209); DMRTB1(63948); PTGFR(5737); |
| | | C1orf56(54964); S100A7L1(338324); ZBTB7B(51043); SDHC(6391); |
| | | ATF6(22926); QSCN6(5768); C1orf21(81563); CTNNBIP1(56998); |
| | | ALDH4A1(8659); RIMS3(9783); AGBL4(84871); CLCC1(23155); |
| | | ENSA(2029); PIK4CB(5298); GLUL(2752); LMOD1(25802); |
| | | C1orf157(284573); SLC41A1(254428); FAIM3(9214); TMEM63A(9725); |
| | | TOMM20(9804); ATP6V1C2(245973); GREB1(9687); FLJ40869(348654); |
| | | HSPC159(29094); SLC1A4(6509); ANTXR1(84168); DLX1(1745); |
| | | NRP2(8828); TSSC1(7260); MCFD2(90411); TFCP2L1(29842); |
| | | NR2C2(7182); ZNF662(389114); LIMD1(8994); RBM15B(29890); |
| | | RAP2B(5912); DVL3(1857); THRB(7068); KIAA1143(57456); |
| | | FYCO1(79443); SMARCC1(6599); SLC26A6(65010); SFMBT1(51460); |
| | | CD47(961); WDR5B(54554); MGLL(11343); PCGF3(10336); |
| | | FLJ35725(152992); LRPAP1(4043); UBE2D3(7323); MAML3(55534); |
| | | PDLIM4(8572); PCDHGB4(8641); ARHGAP26(23092); G3BP(10146); |
| | | MAML1(9794); PDGFRB(5159); SLIT3(6586); GRM6(2916); PPT2(9374); |
| | | GLP1R(2740); DAAM2(23500); GNMT(27232); RUNX2(860); ANKRD6(22881); |
| | | AKAP7(9465); QKI(9444); TRIM26(7726); MOCS1(4337); XPO5(57510); |
| | | ZBTB2(57621); AGPAT4(56895); PHF10(55274); EGFR(1956); |
| | | BCAP29(55973); CFTR(1080); C7orf34(135927); TWISTNB(221830); |
| | | CYCS(54205); LOC401357(401357); RASA4(10156); ZDHHC2(51201); |
| | | CHMP7(91782); FAM83A(84985); TRMT12(55039); MTUS1(57509); |
| | | SCARA5(286133); DD |

TABLE 4-144

| | | |
|---|---|---|
| | | EFI(50807); NCBP1(4688); SPTAN1(6709); TBC1D13(54662); |
| | | TRIM14(9830); STOM(2040); WDR37(22884); ZNF365(22891); |
| | | TMKS2(80351); C10orf26(54838); NEURL(9148); GPR26(2849); |
| | | FLJ46831(399823); DUSP13(51207); DLG5(9231); SFTPA2(6436); |
| | | FAM26C(255022); SH3PXD2A(9644); VAX1(11023); ADAM8(101); |
| | | FAM99A(387742); OLFML1(283298); TUB(7275); TMEM86A(144110); |
| | | BRLZ(283234); RBM14(10432); SNF1Lk2(23235); FANCF(2188); |
| | | LIN7C(55327); EFEMP2(30008); SHANK2(22941); MAML2(84441); |
| | | BACE1(23621); CACNA1C(775); PHC1(1911); FKBP11(51303); |
| | | LASS5(91012); ITGA7(3679); KIAA0286(23306); PPTC7(160760); |
| | | FLJ20674(54621); OASL(8638); FLJ225477(219287);TNFAIP2(7127); |
| | | MAMDC1(161357); TMEM30B(161291); TGFB3(7043); KLF13(51621); |
| | | 76P(27229); PDIA3(2923); Gcom1(145781); SMAD3(4088); |
| | | ABHD2(11057); ACSBG1(23205); TBL3(10607); MGRN1(23295); |
| | | MKL2(57496); PRRT2(112476); GNAO1(2775); ZNRF1(84937); |
| | | GRIN2A(2903); RRN3(54700); GARNL4(23108); TNFSF12(8742); |
| | | MYOCD(93649); SARM1(23098); WIRE(147179); CNP(1267); |
| | | IGF2BP1(10642); DDX42(11325); raptor(57521); CLDN7(1366); |
| | | LOC201164(201164); FLJ36492(284047); MYO18A(399687); |
| | | NUFIP2(57532); TBC1D3C(414060); DUSP3(1845); MRPL10(124995); |
| | | PPP1R9B(84687); FAM104A(84923); SUMO2(6613); RECQL5(9400); |
| | | TMC6(11322); NPLOC4(55666); PCYT2(5833); DLGAP1(9229); |
| | | BCL2(596); ALKBH7(84266); FAM32A(26017); GATAD2A(54815); |
| | | RPL28(6158); C19orf19(284451); GNG7(2788); FLJ46230(400679); |
| | | OPA3(80207); PTPRA(5786); C20orf91(284800); TTLL9(164395); |
| | | C20orf117(140710); PREX1(57580); TMEPAI(56937); BTED4(140685); |
| | | SAMD10(140700); RGS19(10287); ERG(2078); TSSK2(23617); |
| | | UPB1(51733); MGC3731(79159); GTPBP1(9567); PPARA(5465); |
| | | FLJ21125(79680); PPM1F(9647); MSL3L1(10943); FRMPD4(9758); |
| | | PGK1(5230); RNF128(79589); SPRY3(10251); MID1(4281); |
| | | OPHN1(4983); APLN(8862); FAM11A(84548); |
| hsa-miR-629 | 3402; | FLJ43806(399563); PEA15(8682); IPO9(55705); PROX1(5629); |
| | | C1orf95(375057); MYOM3(127294); TTMB(399474); KIAA0319L(79932); |
| | | NEGR1(257194); ENSA(2029); CD84(8832); ENAH(55740); |
| | | ERBB4(2066); EDEM1(9695); SYN2(6854); BSN(8927); ATP11B(23200); |
| | | GORASP1(64689); SORCS2(57537); EREG(2069); GM2A(2760); |
| | | CAMK2A(815); C6orf71(389434); LEMD2(221496); FOXK1(221937); |
| | | ADCY1(107); POM121(9883); RASA4(10156); FREM1(158326); |
| | | WDR31(114987); GPR26(2849); SYNPO2L(79933); KCNMA1(3778); |
| | | TSPAN18(90139); SNF1LK2(23235); TAGLN(6876); ADIPOR2(79602); |
| | | FLJ20489(55652); RBMS2(5939); SLC38A1(81539); VDR(7421); |
| | | CTDSP2(10106); CPM(1368); ATP8A2(51761); FLT1(2321); |
| | | KCTD12(115207); LOC123876(123876); PRRT2(112476); A |

TABLE 4-145

| | | |
|---|---|---|
| | | CSM2(348158); MYOCD(93649); FLJ35934(400579); NT5C(30833); |
| | | TBC1D16(125058); ZNF226(7769); VASP(7408); TP53INP2(58476); |
| | | C20orf121(79183); ZNF343(79175); PTPRT(11122); CABP7(164633); |
| | | H1F0(3005); KDELR3(11015); FLJ44385(400934); NPTXR(23467); |
| | | ZNF673(55634); APLN(8862); |
| hsa-miR-640 | 3403; 3681; | H6PD(9563); RBBP4(5928); MGC52498(348378); ZYG11B(79699); |
| | | SLC35A3(23443); FLVCR(28982); C1orf69(200205); THFRSF9(3604); |
| | | DFFA(1676); FUSIP1(10772); TTMB(399474); C1orf163(65260); |
| | | GNG12(55970); WARS2(10352); CD84(8832); USH2A(7399); FOSL2(2355); |
| | | PPM1B(5495); CEP68(23177); BMPR2(659); CYP20A1(57404); |
| | | TNRC15(26058); FLJ14397(84865); GPR155(151556); STK25(10494); |
| | | ZNF621(285268); GNAT1(2779); ARL6IP5(10550); ST6GAL1(6480); |
| | | THRB(7068); ACTR8(93973); KIAA2018(205717); LOC285382(285382); |
| | | CENTB2(23527); PCYT1A(5130); EREG(2069); C4orf15(79441); |
| | | LRPAP1(4043); DKFZp761B107(91050); ASAHL(27163); MAP2K1IP1(8649); |
| | | FLJ38482(201931); ENPP6(133121); SLC30A5(64924); PCDHGB4(8641); |
| | | SLC26A2(1836); CCNG1(900); ERGIC1(57222); SEMA5A(9037); |
| | | LOC134147(134147); RPS23(6228); REEP5(7905); KIAA1191(57179); |
| | | LOC441136(441136); C6orf134(79969); C6orf107(54887); MYO6(4646); |
| | | QKI(9444); NUDT3(11165); CNR1(1268); DJ122O8.2(57226); SERINC1(57515); |
| | | MTRF1L(54516); IGF2BP3(10643); PMS2L3(5387); HIP1(3092); |
| | | TMEM130(222865); CLN8(2055); PIWIL2(55124); SLC30A8(169026); |
| | | WHSC1L1(54904); CA8(767); MGC21881(389741); FCMD(2218); |
| | | ZNF297B(23099); MCART1(92014); C9orf90(203245); DHTKD1(55526); |
| | | ITIH5(80760); PLEKHK1(219790); AP3M1(26985); SLC16A12(387700); |
| | | SMBP(56889); GPIAP1(4076); CD44(960); ZFP91(80829); STX3A(6809); |
| | | C11orf30(56946); C11orf1(64776); CBL(867); TBRG1(84897); |
| | | FBXO3(26273); C11orf55(399879); PGM2L1(283209); SCN3B(55800); |
| | | BRI3BP(140707); C12orf36(283422); TMTC1(83857); VDR(7421); |
| | | FKBP11(51303); SMUG1(23583); RNF41(10193); KITLG(4254); |
| | | SPPL3(121665); C12orf43(64897); DDX51(317781); GOLGA3(2802); |
| | | ZNF605(90462); KIAA0323(23351); NUBPL(80224); HIF1A(3091); |
| | | SLC39A9(55334); C14orf111(51077); TTC5(91875); IVD(3712); 76P(27229); |
| | | TPM1(7168); SNX22(79856); LOC123688(123688); NGRN(51335); |
| | | UBR1(197131); CSNK1G1(53944); CALML4(91860); UACA(55075); |
| | | MGC2654(79091); CP110(9738); NFATC2IP(84901); PAPD5(64282); |
| | | MARVELD3(91862); PDF(64146); RABEP1(9135); MGC19764(162394); |
| | | WIRE(147179); CNP(1267); RND2(8153); YPEL2(388403); CRK(1398); |
| | | FLJ31952(146857); GJA7(10052); GNA13(10672); NT5C(30833); ACOX1(51); |
| | | FLJ46026(400627); MAPRE2(10982); TNFRSF11A(8792); SERPINB5(5268); |
| | | ZNF24(7572); LDLR(3949); LOC284434(284434); ZNF |

TABLE 4-146

| | | |
|---|---|---|
| | | 101(94039); ZNF431(170959); TIMM50(92609); ZNF264(9422); |
| | | ZNF548(147694); ZNF544(27300); SFRS14(10147); KIAA1559(57677); |
| | | C20orf24(55969); RP5-1104E15.5(54471); TEF(7008); PPARA(5465); |
| | | FLJ21125(79680); LOC440836(440836); PCDH11X(27328); |
| | | AFF2(2334); KLHL15(80311); LAMP2(3920); PCDH11Y(83259); |
| hsa-miR-767-5p | 3404; 3682; | FBXO44(93611); ZBTB40(9923); KPNA6(23633); NFIA(4774); |
| | | SH3GLB1(51100); VANGL1(81839); MPZL1(9019); FLJ35530(400798); |
| | | LAMC2(3918); HMCN1(83872); NAV1(89796); ATP2B4(493); |
| | | C1orf69(200205); MTR(4548); CSDE1(7812); IGSF3(3321); |
| | | SHE(126669); CD84(8832); C1orf96(126731); MRPL35(51318); |
| | | COL3A1(1281); ICOS(29851); LOC92691(92691); C2orf17(79137); |
| | | DGKD(8527); SFXN5(94097); MOBK1B(55233); SESTD1(91404); |
| | | WDFY1(57590); COL4A4(1286); ARPP-21(10777); DLEC1(9940); |
| | | SPCS1(28972); PTPRG(5793); LOC440993(440993); PCGF3(10336); |
| | | MGC21675(92070); LRPAP1(4043); OTUD4(54726); ARSK(153642); |
| | | MFAP3(4238); LSM11(134353); RPL37(6167); P18SRP(285672); |
| | | ADAMTS2(9509); STK19(8859); DAAM2(23500); MTRF1L(54516); |
| | | Ells1(222166); ADCY1(107); ZNF655(79027); KIAA0265(23008); |
| | | MEST(4232); NDUFA4(4697); CYCS(54205); HIP1(3092); IMPDH1(3614); |
| | | FAM77D(286183); PI15(51050); TNFRSF10B(8795); RUNX1T1(862); |
| | | C9orf47(286223); PALM2(114299); POLE3(54107); MAP3K8(1326); |
| | | ZNF37A(7587); CXXC6(80312); SFXN3(81855); GPR26(2849); |
| | | C10orf67(256815); HERC4(26091); ADAM12(8038); TMEM86A(144110); |
| | | FZD4(8322); OPCML(4978); METTL7B(196410); TDG(6996); |
| | | FLJ25477(219287); DCAMKL1(9201); LTB4R2(56413); VASH1(22846); |
| | | KIAA0125(9834); CHES1(1112); C14orf143(90141); GANC(2595); |
| | | AP4E1(23431); RAB11A(8766); SCAND2(54581); FLJ39743(283777); |
| | | ABAT(18); SPN(6693); PSKH1(5681); C16orf28(65259); |
| | | ZNF694(342357); Pfs2(51659); ANKRD13B(124930); WIRE(147179); |
| | | CNP(1267); PMP22(5376); C17orf76(388341); MYO1D(4642); |
| | | ACACA(31); PECAM1(5175); ACOX1(51); TBC1D16(125058); |
| | | DOT1L(84444); HIF3A(64344); LOC91661(91661); FUT5(2527); |
| | | ZNF577(84765); C20orf29(55317); RAB22A(57403); NTSR1(4923); |
| | | RIMS4(140730); BRWD1(54014); DGCR8(54487); PPARA(5465); |
| | | LOC388886(388886); APOL4(80832); MSN(4478); RNF12(51132); |
| hsa-miR-770-5p | 3405; 3683; | CDC20(991); C1orf84(149469); HS2ST1(9653); C1orf60(65123); |
| | | PPP1R12B(4660); STMN1(3925); NUDT17(200035); NUCKS1(64710); |
| | | C1orf140(400804); STEAP3(55240); CDC42EP3(10602); ANKRD23(200539); |
| | | TRNT1(51095); DLEC1(9940); NUDT16(131870); P2RY1(5028); |
| | | KIAA2018(205717); LOC285429(285429); WDR55(54853); ZDHHC11(79844); |
| | | SMA4(11039); DSCR1L1(10231); SIMI(6492); ZNF12(7559); |
| | | LOC442582(442582); ENTPD4(9583); RNF1 |

TABLE 4-147

| | | |
|---|---|---|
| | | 70(81790); TP53INP1(94241); TRPS1(7227); NTRK2(4915); |
| | | MRC1L1(414308); BCCIP(56647); NRP1(8829); COPB(1315); |
| | | KCNJ11(3767); FBXO3(26273); CCND2(894); TFCP2(7024); GLS2(27165); |
| | | FLJ20859(64745); SUPT16H(11198); CSNK1G1(53944); CD2BP2(10421); |
| | | DYNC1L12(1783); LOC283849(283849); BIRC4BP(54739); |
| | | RAB11FIP4(84440); PRKCA(5578); AP1GBP1(11276); HELZ(9931); |
| | | RAB12(201475); NCLN(56926); F2RL3(9002); ZNF480(147657); |
| | | ATRN(8455); PTPN1(5770); CTB-1048E9.5(402055); NF2(4771); |
| | | CXorf17(54954); LAMP2(3920); |
| hsa-miR-802 | 3406; 3684; | AGRN(375790); TCEB3(6924); RBBP4(5928); KLF17(128209); |
| | | BTF3L4(91408); LEPROT(54741); SFRS11(9295); SAMD13(148418); |
| | | LMO4(8543); RAP1A(5906); CTTNBP2NL(55917); KLHL20(27252); |
| | | SOAT1(6646); C1orf21(81563); PFKFB2(5208); RPS6KC1(26750); |
| | | C1orf71(163882); KIAA0495(57212); MCOLN3(55283); TMED5(50999); |
| | | GSTM3(2947); SHE(126669); ZBTB41(360023); TNNI1(7135); |
| | | ACBD3(64746); CDC42BPA(8476); GRHL1(29841); SPTBN1(6711); |
| | | FLJ16124(440867); MXD1(4084); FLJ20758(55037); LOC339745(339745); |
| | | EPC2(26122); ARL6IP6(151188); KLHL23(151230); ZAK(51776); |
| | | ITGA4(3676); KIAA1946(165215); GULP1(51454); BMPR2(659); |
| | | CREB1(1385); PTHR2(5746); RHBDD1(84236); CAB39(51719); |
| | | ADAM17(6868); LRPPRC(10128); CACNB4(785); FIGN(55137); |
| | | GALNT3(2591); PGAP1(80055); USP37(57695); EAF1(85403); |
| | | NKTR(4820); LIMD1(8994); ATXN7(6314); SLC15A2(6565); |
| | | RAB7(7879); CLDN18(51208); ACPL2(92370); HPS3(84343); |
| | | GMPS(8833); PIK3CA(5290); ATP11B(23200); KLHL24(54800); |
| | | ANKRD28(23243); SLC4A7(9497); EPM2AIP1(9852); KIAA1143(57456); |
| | | SLC6A20(54716); TMEM110(375346); ADAMTS9(56999); FOXP1(27086); |
| | | VGLL3(389136); ZBTB11(27107); CD47(961); OSBPL11(114885); |
| | | DKFZP686AO1247(22998); REST(5978); TMPRSS11E(28983); |
| | | RUFY3(22902); CCNG2(901); FLJ35630(166379); GAB1(2549); |
| | | TLL1(7092); STOX2(56977); GRSF1(2926); FLJ38991(285521); |
| | | DDIT4L(115265); LRP2BP(55805); FAM105B(90268); FLJ13611(80006); |
| | | TNPO1(3842); SCAMP1(9522); PCDHGB4(8641); G3BP(10146); |
| | | NSD1(64324); CANX(821); MYO10(4651); RICTOR(253260); |
| | | OSRF(23548); DKFZP781I1119(166968); P18SRP(285672); |
| | | ATG12(9140); DPYSL3(1809); FBXW11(23291); MRS2L(57380); |
| | | SENP6(26054); C6orf78(221301); C6orf68(116150); HINT3(135114); |
| | | HECA(51696); WTAP(9589); C6orf120(387263); C6orf195(154386); |
| | | C6orf62(81688); CD164(8763); CDC2L6(23097); HBS1L(10767); |
| | | AHR(196); TAX1BP1(8887); Ells1(222166); ZNRF2(223082); |
| | | EGFR(1956); CCT6A(908); LOC441257(441257); ADAM22(53616); |
| | | STEAP2(261729); CHRM2(1129); CNTNAP2(26047); RBM33(155435); |
| | | DGKB(1607); JAZF1(221895); TMED4(222068); HIP1(3092 |

TABLE 4-148
); CACNA2D1(781); CDK6(1021);FLJ36031(168455);
NRCAM(4897); CNOT4(4850); MTMR9(66036);
EFHA2(286097); MRPL15(29088); BHLHB5(27319);
WDSOF1(25879); PHF20L1(51105); ADRA1A(148);
GTF2E2(2961); TRPA1(8989); RPESP(157869);
ZNF704(619279); MMP16(4325); TP53INP1(94241);
MELK(9833); MAK10(60560); C9orf47(286223);
SMC2L1(10592); PTPRD(5789); PSIP1(11168);
RNF38(152006); CNTNAP3(79937); PTCH(5727);
SUSD1(64420); PSMD5(5711); ZNF482(10773);
ARL5B(221079); ZNF33A(7581); LRRTM3(347731);
SFTPA1(6435); MAA1128(54462);
TCF7L2(6934); KIAA1600(57700); ANKRD26(22852);
ZNF11B(7558); C10orf25(220979);
RP11-142I17.1(26095); SH3PXD2A(9644);
TEAD1(7003); HIPK3(10114); GPIAP1(4076);
CD44(960); LOC399898(399898); C11orf1(64776);
CHEK1(1111); RRAS2(22800); CD59(966);
TRAF6(7189); PGM2L1(283209); CHORDC1(26973);
MRE11A(4361); TMEM123(114908); PTPRO(5800);
ETNK1(55500); HMGA2(8091); CPSF6(11052);
CLEC4E(26253); SOX5(6660); TMTC1(83857);
SLC38A1(81539); ZBTB39(9880); OSBPL8(114882);
SLC6A15(55117); IGF1(3479); FLJ40142(400073);
PPTC7(160760); SLC15A4(121260); PAN3(255967);
RP11-367C11.1(145173); RFC3(5983);
RFXAP(5994); FLJ30046(122060); CULAA(8451);
C13orf8(283489); LATS2(26524);
FLJ46358(400110); FLT1(2321); KIAA1008(22894);
KIAA1333(55632); NRXN3(9369); TRAF3(7187);
KNS2(3831); GMFB(2764); BTBD7(55727);
KIAA1018(22909); SPRED1(161742); TMOD2(29767);
RNF111(54778); SNX1(6642); FBXO22(26268);
IREB2(3658); UBE3A(7337); RASGRP1(10125);
ZFP106(64397); MYEF2(50804); ARPP-19(10776);
VPS13C(54832); CALML4(91860); CYLD(1540);
CBFB(865); KIAA0174(9798); KIAA0182(23199);
ZNF694(342357); FTS(64400); CMTM4(146223);
SOCS7(30837); CASC3(22794); RUNDC1(146923);
NXPH3(11248); TMEM49(81671); PRKAR1A(5573);
DDX52(11056); FAM104A(84923); CEP192(55125);
ME2(4200); SERPINB13(5275); FECH(2235);
ZNF333(84449); CSPG3(1463); KCTD15(79047);
LOC390980(390980); MOBKL2A(126308);
RHPN2(85415); FLL38451(126375);
C20orf29(55317); PYGB(5834); PHF20(51230);
C20orf77(58490); CSE1L(1434); OSBPL2(9885);
C20orf11(54994); FLJ13149(60493);
FLRT3(23767); CD93(22918); CHD6(84181);
ZNF334(55713); ADAMTS1(9510); ZNF294(26046);
DSCR3(10311); BRWD1(54014); LIMK2(3985);
LOC63929(63929); IL2RB(3560); PACSIN2(11252);
CLCN4(1183); RP2(6102); CLCN5(1184);
PGK1(5230); KLHL4(56062); DDX26B(203522);
LOC203547(203547); PNMA6A(84968); KLHL15(80311);
CXorf38(159013); RNF12(51132); RP11-130N24.1
(340533); PCDH19(57526);

[0052] The substance that controls the expression or a function of a nucleic acid, such as a micro-RNA, used in the present invention, may be any substance such as a low-molecular compound, antibody, or siRNA, as far as it inhibits the expression or a function of the nucleic acid, and an siRNA is particularly preferable. As substances that suppress the expression of a nucleic acid, such as a micro-RNA, used in the present invention, substances that inhibit the function of a factor that is essential to the biosynthesis of the micro-RNA can also be used. Factors that are essential to the biosynthesis of a micro-RNA include, for example, Dicer, TRBP, Exportin5, Drosha, DGCR8 and the like.

[0053] As a method of expressing a nucleic acid such as a micro-RNA in cells in the present invention, a method using, for example, besides a gene encoding mRNA, a nucleic acid that causes the expression of the micro-RNA and the like when introduced into the cells can be mentioned. As the nucleic acid, a DNA, an RNA, or a nucleotide analogue, as well as a chimeric molecule thereof, or a derivative of the nucleic acid can also be used. Specifically, the nucleic acid can be designed in the same way as with Pre-miR™ miRNA Precursor Molecules (manufactured by Ambion) or miRIDIAN microRNA Mimics (manufactured by GE Healthcare), and the nucleic acid such as the micro-RNA of the present invention can be expressed in cells. Any method can be used to express a micro-RNA, as far as it allows the micro-RNA to be finally formed in the cells; for example, (1) a method wherein a single-stranded RNA that is a precursor of the micro-RNA is introduced, as well as (2) a method wherein an RNA consisting of double-strand consisting of the micro-RNA as it is and a complementary strand for the micro-RNA, which completely complement each other, is introduced, and (3) a method wherein a double-stranded RNA assumed to have resulted from cleavage of a micro-RNA with a Dicer is introduced, can be mentioned. As examples of commercial products based on these methods, miCENTURY OX Precursor (manufactured by B-Bridge), miCENTURY OX siMature (manufactured by B-Bridge), and miCENTURY OX miNatural (manufactured by B-Bridge), respectively, can be mentioned.

[0054] The method of producing a nucleic acid used in the present invention is not particularly limited; the same can be produced by a method using a publicly known chemical synthesis, or an enzymatic transcription method and the like. As methods using a publicly known chemical synthesis, the phosphoroamidite method, the phosphorothioate method, the phosphotriester method and the like can be mentioned; for example, the same can be synthesized using the ABI3900 high throughput nucleic acid synthesizer (manufactured by Applied Biosystems). As an enzymatic transcription method, transcription with a plasmid or DNA having a desired nucleotide sequence as the template using a typical phage RNA polymerase, for example, T7, T3, or SP6RNA polymerase, can be mentioned.

[0055] As an example of a method of screening a substance that suppresses the expression or a function of a nucleic acid by using the nucleic acid used in the present invention, a method can be mentioned wherein a vector that expresses the nucleic acid is introduced into cells, and a substance that promotes or suppresses the expression or a function of an mRNA having a target nucleotide sequence therefor is screened for.

[0056] A pharmaceutical with a nucleic acid used in the present invention as an active ingredient can be used to diagnose or treat a disease caused by an abnormality of mast cell.

[0057] As diseases caused by a mast cell abnormality, specifically, atopic dermatitis, asthma, chronic obstructive lung disease, and allergic disease and the like can be mentioned.

[0058] Because abnormalities of mast cells include abnormalities in degranulation, a nucleic acid used in the present invention can be used as a mast cell degranulation control agent, that is, a degranulation promoter or a degranulation suppressant.

[0059] Mast cell degranulation suppressants are suitably used as prophylactic agents or therapeutic agents for atopic dermatitis, asthma, chronic obstructive pulmonary disease, allergic diseases and the like.

[0060] Mast cell degranulation promoters are suitably used as immunopotentiators.

[0061] The present invention is hereinafter described in detail.

### 1. Method of Detecting the Expression of Nucleic Acids Such as Micro-RNAs and Micro-RNA Precursors Expressed in Mast Cells

### (1-1) Acquisition and Cultivation of Mast Cells

[0062] The method of acquiring human mast cells is not particularly limited, as far as the human mast cells are acquired safely and efficiently; human mast cells can, for example, be prepared from a human lung, skin, fetal liver and the like by a commonly known method (J. Immunol. Methods, 169, 153 (1994); J. Immunol., 138, 861 (1987); J. Allergy Clin. Immunol., 107, 322 (2001); J. Immunol. Methods., 240, 101 (2000)). Human mast cells can also be prepared by culturing mononuclear cells prepared from human umbilical blood, peripheral blood, bone marrow, lung or skin in the presence of a stem cell factor (hereinafter abbreviated SCF) according to a commonly known method (J. Immunol., 157, 343, (1996); Blood, 91, 187 (1998); J. Allergy Clin. Immunol., 106, 141 (2000); Blood, 97, 1016 (2001); Blood, 98, 1127 (2001); Blood, 100, 3861 (2002); Blood, 97, 2045 (2001)) to allow the mononuclear cells to differentiate into mast cells.

[0063] A cell line established from a human mast cell can also be used. As human mast cell lines, LAD2 (Leuk. Res., 27, 671 (2003); Leuk. Res., 27, 677 (2003)), which is known to well retain the properties of human mast cells, and the like can be mentioned.

### (1-2) Acquisition of RNA

[0064] The method of extracting total RNA from the mast cells acquired by the various methods described above is not particularly limited, as far as a low-molecular RNA such as a micro-RNA is contained; for example, this extraction can be performed by a method described in Molecular Cloning, 3rd edition. Alternatively, the total RNA can also be extracted using Trizol (manufactured by Invitrogen Company), ISOGEN (manufactured by Nippon Gene Company), mirVana™ miRNA Isolation Kit (manufactured by Ambion Company), miRNeasy Mini Kit (manufactured by QIAGEN Company) and the like.

[0065] A low-molecular RNA can also be cloned from a total RNA containing the low-molecular RNA. As a method of cloning a low-molecular RNA, specifically, a method wherein separation and cutting out of a low-molecular RNA by 15% polyacrylamide gel electrophoresis as described in Genes & Development 15, 188-200 (2000), can be mentioned. Then, 5′ terminal dephosphorylation, 3′-adapter ligation, phosphorylation, 5′-adapter ligation, reverse transcription, PCR amplification, concatemerization, and ligation to a vector are performed sequentially, thereafter the low-molecular RNA is cloned, and the nucleotide sequence of the clone is determined. Alternatively, for example, a method wherein 5′-adenylation 3′-adapter ligation, 5′-adapter ligation, reverse transcription, PCR amplification, concatemerization, and ligation to a vector are performed sequentially, thereafter the low-molecular RNA is cloned, and the nucleotide sequence of the clone is also determined, as described in Science 294, 858-862 (2001).

[0066] Alternatively, separation and cleavage of low-molecular RNA by 15% polyacrylamide gel electrophoresis, 5′ terminal dephosphorylation, 3′-adapter ligation, phosphorylation, 5′-adapter ligation, reverse transcription, PCR amplification, and ligation to a microbead vector are performed sequentially, thereafter the low-molecular RNA is cloned, and the nucleotide sequence of the microbeads is read to determine the nucleotide sequence, whereby nucleotide sequence information of the low-molecular RNA can also be acquired, as described in Nucleic Acids Research 34, 1765-1771

[0067] As another method of acquiring a low-molecular RNA, a method involving the use of the low-molecular RNA Cloning Kit (manufactured by Takara Bio Company) can be mentioned.

### (1-3) Identification of Micro-RNA

[0068] Whether or not the low-molecular RNA sequence is a micro-RNA can be determined on the basis of whether or not the criteria described in RNA, 9, 277-279 (2003) are met. For example, in cases where the low-molecular RNA was newly acquired and the nucleotide sequence thereof was determined, this can be performed as described below.

[0069] A surrounding genome sequence wherein a DNA sequence corresponding to the nucleotide sequence of the low-molecular RNA acquired is extended by about 50 nucleotides toward the 5′ terminal side and the 3′ terminal side, respectively, is acquired, and the secondary structure of the RNA expected to be transcribed from the genome sequence is predicted. If the result shows that a hairpin structure is present and the nucleotide sequence of the low-molecular RNA is located in one chain of the hairpin, the low-molecular RNA can be judged to be a micro-RNA. Genome sequences are open to the general public, and are available from, for example, UCSC Genome Bioinformatics (http://genome.ucsc.edu/). For prediction of secondary structures, various programs are open; for example, RNAfold [Nucleic Acids Research 31, 3429-3431 (2003)], Mfold [Nucleic Acids Research 31, 3406-3415 (2003)] and the like can be used. Existing micro-RNA sequences are registered in a database called miRBase (http://microrna.sanger.ac.uk/); whether or not a micro-RNA is identical to an existing micro-RNA can be determined on the basis of whether or not the sequence thereof is identical to one of the sequences listed therein.

### (1-4) Method of Detecting the Expression Levels of Nucleic Acid Such as Micro-RNA

[0070] As examples of methods of detecting the expression levels of nucleic acid such as micro-RNA, a precursor thereof and the like, methods by (1) Northern hybridization, (2) dot blot hybridization, (3) in situ hybridization, (4) quantitative PCR, (5) differential hybridization, (6) microarray, (7) ribonuclease protection assay and the like can be mentioned.

[0071] The Northern hybridization is a method wherein a sample-derived RNA is separated by gel electrophoresis, then transferred to a solid support such as a nylon filter, and an appropriately-labeled probe is prepared on the basis of the nucleotide sequence of the nucleic acid of the present invention, and hybridization and washing are performed, whereby a band specifically bound to the nucleic acid is detected; specifically, for example, this method can be performed as described in Science 294, 853-858 (2001) and the like.

[0072] A labeled probe can be prepared by incorporating a radioisotope, biotin, digoxigenin, a fluorescent group, a chemiluminescent group and the like in a DNA, RNA, or LNA having a sequence complementary to the nucleotide sequence of the nucleic acid to be used by a method, for example, nick translation, random priming or 5′-terminal phosphorylation. Because the amount of labeled probe bound reflects the expression level of the nucleic acid, the expression level of the nucleic acid can be quantified by quantifying the amount of labeled probe bound. Electrophoresis, membrane transfer, probe preparation, hybridization, and nucleic acid detection can be achieved by a method described in Molecular Cloning, 3rd edition.

[0073] Dot blot hybridization is a method wherein an RNA extracted from a tissue or a cell is spotted in dot forms and immobilized on a membrane, and hybridized with a labeled polynucleotide to be a probe, and an RNA that specifically hybridizes with the probe is detected. The probe used may be the same as that used for Northern hybridization. RNA preparation, RNA spotting, hybridization, and RNA detection can be achieved by a method described in Molecular Cloning, 3rd edition.

[0074] In situ hybridization is a method wherein a paraffin-embedded or cryostat-treated section of a tissue acquired from a living organism, or a cell fixed, is used as a sample and subjected to steps for hybridization with a labeled probe and washing, and the distribution and localization of a nucleic acid in the tissue or cell are examined by microscopic examination [Methods in Enzymology, 254, 419 (1995)]. The probe used may be the same as that used for Northern hybridization. Specifically, a nucleic acid such as micro-RNA etc. can be detected in accordance with a method described in Nature Method 3, 27 (2006).

[0075] In quantitative PCR, a cDNA synthesized from a sample-derived RNA using a primer for reverse transcription and a reverse transcriptase (hereunder, this cDNA is also referred to as a sample-derived cDNA) is used for the measurement. As a primer for reverse transcription to be supplied for cDNA synthesis, a random primer or a specific RT primer and the like can be used. A specific RT primer refers to a primer having a sequence complementary to a nucleotide sequence corresponding to a nucleic acid and a genomic sequence therearound.

[0076] For example, a sample-derived cDNA is synthesized, after which a PCR is performed with this cDNA as the template, using a template-specific primer designed from a nucleotide sequence corresponding to a nucleic acid such as micro-RNA or micro-RNA precursor and a genomic sequence therearound, or from a nucleotide sequence corresponding to a primer for reverse transcription, to amplify a cDNA fragment containing the nucleic acid used in the present invention, and the amount of the nucleic acid of the present invention contained in the sample-derived RNA is detected from the number of cycles for reach to a given amount of the fragment. As the template-specific primer, an appropriate region corresponding to a nucleic acid and a genomic sequence therearound is selected, and a pair of a DNA or LNA consisting of a sequence of 20 to 40 nucleotides at the 5′ terminus of the nucleotide sequence of the region, and a DNA or LNA consisting of a sequence complementary to a sequence of 20 to 40 nucleotides at the 3′ terminus, can be used. Specifically, this can be performed in accordance with a method described in Nucleic Acids Research, 32, e43 (2004) and the like.

[0077] Alternatively, as the primer for reverse transcription to be supplied for cDNA synthesis, a specific RT primer having a stem-loop structure can also be used. Specifically, this can be performed using a method described in Nucleic Acid Research, 33, e179 (2005), or TaqMan MicroRNA Assays (manufactured by Applied Biosystems).

[0078] Furthermore, by hybridizing a sample-derived cDNA to a DNA or LNA corresponding to a nucleotide sequence comprising at least one or more of nucleic acids such as micro-RNA, micro-RNA precursor and the like to be used in the present invention immobilized on a substrate such as a filter, glass slide, or silicone, and performing washing, a change in the amount of the nucleic acid can be detected.

[0079] As such methods based on hybridization, methods using differential hybridization [Trends Genet., 7, 314 (1991)] or a microarray (Genome Res., 6, 639 (1996)) can be mentioned. Both methods enable accurate detection of a difference in the amount of a nucleic acid between a control sample and a target sample by immobilizing an internal control, such as a nucleotide sequence corresponding to U6RNA, on a filter or a substrate. Also, by synthesizing labeled cDNAs using differently labeled dNTPs (mixtures of dATP, dGTP, dCTP, and dTTP) on the basis of RNAs derived from a control sample and a target sample, and simultaneously hybridizing the two labeled cDNAs to a single filter or a single substrate, accurate quantitation of a nucleic acid can be performed. For example, nucleic acids such as micro-RNA and the like can be detected using a microarray described in Proc. Natl. Acad. Sci. USA, 101, 9740-9744 (2004), Nucleic Acid Research, 32, e188 (2004), RNA, 13, 151-159 (2007) and the like. Specifically, a micro-RNA can be detected or quantified in the same manner as mirVana miRNA Bioarray (manufactured by Ambion).

[0080] In ribonuclease protection assay, first, a promoter sequence such as the T7 promoter or the SP6 promoter is bound to the 3′ terminus of a nucleotide sequence corresponding to the nucleic acid such as micro-RNA or micro-RNA precursor to be used in the present invention or a genomic sequence therearound, and a labeled antisense RNA is synthesized with an in vitro transcription system using a labeled NTP (a mixture of ATP, GTP, CTP, and UTP) and an RNA polymerase. The labeled antisense RNA is bound to a sample-derived RNA to form an RNA-RNA hybrid, after which the hybrid is digested with ribonuclease A, which degrades single-stranded RNAs only. The digest is subjected to gel electrophoresis to detect or quantify an RNA fragment protected against the digestion by forming the RNA-RNA hybrid, as a nucleic acid. Specifically, the fragment can be detected or quantified using the mirVana miRNA Detection Kit (manufactured by Ambion).

### 2. Synthesis of Nucleic Acid

[0081] The nucleic acid to be used in the present invention such as a micro-RNA or micro-RNA precursor can synthesize not only an RNA, which is a polymer of a ribonucleotide, but also a DNA, which is a polymer of a deoxyribonucleotide, on the basis of the nucleotide sequences. For example, on the basis of the nucleotide sequence of the micro-RNA identified in 1 above, the nucleotide sequence of a DNA can be determined. The nucleotide sequence of a DNA corresponding to the nucleotide sequence of an RNA can be determined, without exception, by reading the U (uracil) contained in the sequence of the RNA as T (thymine). A polymer being a mixture of a ribonucleotide and a deoxyribonucleotide and a polymer comprising a nucleotide analogue and a derivative of a nucleic acid can also be synthesized in the same manner.

[0082] The method of synthesizing a nucleic acid used in the present invention is not particularly limited; a method using a publicly known chemical synthesis, or an enzymatic transcription method and the like can be mentioned. As methods using a publicly known chemical synthesis, the phosphoroamidite method, the phosphorothioate method, the phosphotriester method and the like can be mentioned; for example, a nucleic acid can be synthesized using the ABI3900 high throughput nucleic acid synthesizer (manufactured by Applied Biosystems). As an enzymatic transcription method, a method by transcription with a plasmid or DNA having a desired nucleotide sequence as the template using a typical phage RNA polymerase, for example, T7, T3, or SP6RNA polymerase, can be mentioned.

### 3. Method of Detecting a Function of a Nucleic Acid Such as Micro-RNA or Micro-RNA Precursor

[0083] As a method of detecting a function of a nucleic acid such as a micro-RNA, a method can be mentioned wherein the function is determined on the basis of whether or not the translation of the mRNA having a target nucleotide sequence is suppressed.

[0084] Micro-RNAs are known to suppress the translation of an mRNA comprising a target nucleotide sequence thereof on the 3′ side (3′UTR) [Current Biology, 15, R458-R460 (2005)]. Hence, a DNA wherein a target nucleotide sequence for the single-stranded RNA to be measured is inserted into the 3′UTR of an appropriate reporter gene expression vector is prepared and introduced into a host cell suitable for the expression vector, and the expression of the reporter gene is measured when the cell is allowed to express the single-stranded RNA, whereby whether or not a function of a micro-RNA is possessed can be determined.

[0085] The reporter gene expression vector may be any one, as far as it has a promoter upstream of a reporter gene, and is capable of expressing the reporter gene in the host cell. Any reporter gene can be used; for example, the firefly luciferase gene, the Renilla luciferase gene, the chloramphenicol acetyltransferase gene, the β-glucuronidase gene, the β-galactosidase gene, the β-lactamase gene, the aequorin gene, the green fluorescent protein gene, the DsRed fluorescence gene and the like can be utilized. As examples of reporter gene expression vectors having these properties, psiCHECK-1 (manufactured by Promega), psiCHECK-2 (manufactured by Promega), pGL3-Control (manufactured by Promega), pGL4 (manufactured by Promega), pRNAi-GL (manufactured by Takara Bio Inc.), pCMV-DsRed-Express (manufactured by CLONTECH) and the like can be mentioned. A single-stranded RNA can be expressed by the method described in 5 below.

[0086] As the function of a micro-RNA of a single-stranded RNA, detection can be achieved as described below. First, host cells are cultured on a multi-well plate and the like, and a reporter gene expression vector having a target sequence and a single-stranded RNA are expressed. Thereafter, reporter activity is measured both when the single-stranded RNA is and is not expressed, based on which the function of micro-RNA can be detected.

### 4. Method of Detecting a Mutation of a Nucleic Acid Such as Micro-RNA or Micro-RNA Precursor

[0087] As a method of detecting a mutation of a nucleic acid such as a micro-RNA or micro-RNA precursor, a method can be used wherein a heteroduplex formed by hybridization of a normal type nucleic acid and a mutated type nucleic acid are detected.

[0088] As methods of detecting a heteroduplex, (1) detection of a heteroduplex by polyacrylamide gel electrophoresis (Trends genet., 7, 5 (1991)), (2) single-strand conformation polymorphism analysis (Genomics, 16, 325-332 (1993)), (3) chemical cleavage of mismatches (CCM) (Human Genetics (1996), Tom Strachan and Andrew P. Read, BIOS Scientific Publishers Limited), (4) enzymatic cleavage of mismatches (Nature Genetics, 9, 103-104 (1996)), (5) denatured gel electrophoresis (Mutat. Res., 288, 103-112 (1993)) and the like can be mentioned.

[0089] Detection of a heteroduplex by polyacrylamide gel electrophoresis is, for example, performed as described below. First, with a sample-derived DNA or a sample-derived cDNA as a template, and using a primer designed on the basis of a genomic nucleotide sequence comprising the nucleotide sequence of a nucleic acid used in the present invention, a fragment smaller than 200 nucleotide pairs is amplified. Heteroduplexs, if formed, are slower in mobility than mutation-free homoduplexs, and can be detected as extra bands. In the case of search for a fragment smaller than 200 nucleotide pairs, almost any insertions, deletions, and substitutions of one or more nucleotides can be detected. It is desirable that heteroduplex analysis be performed using a single gel in combination with the single strand conformation analysis described below.

[0090] In single strand conformation polymorphism analysis (SSCP analysis), a DNA amplified as a fragment smaller than 200 bp with a sample-derived DNA or sample-derived cDNA as the template, using a primer designed on the basis of a genomic nucleotide sequence comprising the nucleotide sequence of a nucleic acid of the present invention, is denatured, after which it is electrophoresed in non-denatured polyacrylamide gel. By labeling the primer with an isotope or a fluorescent dye at the time of DNA amplification, or by silver-staining the non-labeled amplification product, the amplified DNA can be detected as a band. To clarify a difference from the wild type pattern, a control sample may be electrophoresed simultaneously, whereby a fragment with a mutation can be detected on the basis of a difference in mobility.

[0091] In chemical cleavage of mismatches (CCM method), a DNA fragment amplified with a sample-derived DNA or sample-derived cDNA as the template, using a primer designed on the basis of a genomic nucleotide sequence comprising the nucleotide sequence of a nucleic acid of the present invention is hybridized to a labeled nucleic acid prepared by allowing a nucleic acid to incorporate an isotope or a fluorescent target, and treated with osmium tetraoxide to cleave one strand of the DNA at the mismatched portion, whereby a mutation can be detected. CCM is one of the most sensitive methods of detection, and can be applied to samples of kilobase length.

[0092] In place of osmium tetraoxide used above, T4 phage resolves and an enzyme involved in mismatch repair in cells, such as endonuclease VII, and RNaseA may be used in combination to enzymatically cleave a mismatch.

[0093] In denaturing gradient gel electrophoresis (DGGE method), a DNA amplified with a sample-derived DNA or sample-derived cDNA as the template, using a primer designed on the basis of a genomic nucleotide sequence comprising the nucleotide sequence of a nucleic acid of the present invention is electrophoresed using a gel having a chemical denaturant density gradient or a temperature gradient. The DNA fragment amplified migrates in the gel to a position where it denatures to a single strand, and no longer migrates after the denaturation. Because the migration of the amplified DNA in the gel differs between the presence and absence of a mutation, the presence of the mutation can be detected. To increase the detection sensitivity, the addition of a poly(G:C) end to each primer is effective.

[0094] By directly determining and analyzing the nucleotide sequence of a sample-derived DNA or sample-derived cDNA, a mutation of a nucleic acid used in the present invention can also be detected.

### 5. Methods of Expressing a Nucleic Acid Such as Micro-RNA or Micro-RNA Precursor

[0095] A nucleic acid used in the present invention can be expressed by using a vector such that a nucleic acid is transcribed and hence biosynthesized when the vector is introduced into a cell. Specifically, by preparing a DNA fragment comprising a hairpin portion on the basis of the aforementioned nucleotide sequence of a nucleic acid or a genomic nucleotide sequence comprising the foregoing nucleotide sequence, and inserting the fragment downstream of a promoter in the expression vector to construct an expression plasmids, and then introducing the expression plasmid into a host cell suitable for the expression vector, whereby the aforementioned nucleic acid can be expressed.

[0096] As an expression vector, one capable of self-replication in the host cell, and capable of being incorporated in the chromosome, which comprises a promoter at a position enabling the transcription of a gene comprising the nucleotide sequence of a nucleic acid of the present invention is used. The promoter may be any one, as far as it is capable of expressing in the host cell; for example, a RNA polymerase II (pol II) system promoter, a RNA polymerase III (pol III) system promoter being a U6RNA and H1RNA transcription system and the like can be mentioned. As examples of pol II system promoters, the promoter of the cytomegalovirus (human CMV) IE (immediate early) gene, the early promoter of SV40 and the like can be mentioned. As examples of expression vectors using them, pCDNA6.2-GW/miR (manufactured by Invitrogen), pSilencer 4.1-CMV (manufactured by Ambion) and the like can be mentioned. As pol III system promoters, U6RNA, H1RNA or tRNA gene promoters can be mentioned. As examples of expression vectors using them, pSINsi-hH1 DNA (manufactured by Takara Bio Inc.), pSINsi-hU6 DNA (manufactured by Takara Bio Inc.), pENTR/U6 (manufactured by Invitrogen) and the like can be mentioned.

[0097] Alternatively, by inserting a gene comprising the nucleotide sequence of a nucleic acid used in the present invention into the downstream of the promoter in a viral vector to construct a recombinant viral vector, and introducing the vector into a packaging cell to produce a recombinant virus, the gene comprising the nucleic acid can be expressed.

[0098] The packaging cell may be any cell, as far as it is capable of supplementing a recombinant viral vector deficient in any one of the genes that encode the proteins necessary for the packaging of the virus with the lacked protein; for example, human kidney-derived HEK293 cells, mouse fibroblasts NIH3T3 and the like can be used. As the protein supplemented by the packaging cell, in the case of a retrovirus vector, proteins derived from a mouse retrovirus, such as gag, pol, and env, can be used; in the case of a lentivirus vector, proteins derived from a HIV virus, such as gag, pol, env, vpr, vpu, vif, tat, rev, and nef, can be used; in the case of an adenovirus vector, proteins derived from an adenovirus, such as E1A and E1B, can be used; in the case of an adeno-associated viral vector, proteins such as Rep (p5, p19, p40) and Vp(Cap), can be used.

[0099] Aside from using an expression vector, at is also possible to introduce a nucleic acid used in the present invention directly to the cell without using a vector. Such nucleic acids useful in this method include not only DNA, RNA or nucleotide analogues, but also chimera molecules thereof, or derivatives of the nucleic acids. Specifically, in the same manner as with Pre-miR™ miRNA Precursor Molecules (manufactured by Ambion Company) and miRIDIAN microRNA Mimics (manufactured by GE Healthcare Company), a nucleic acid used in the present invention can be expressed. When a micro-RNA is expressed, any method can be used, as far as it allows the micro-RNA to be eventually produced in the cell; examples include methods wherein (1) a single-stranded RNA which is a micro-RNA precursor, (2) an RNA consisting of a double strand consisting of a micro-RNA and a strand complementary to the micro-RNA which are completely complementary to each other, (3) or a double-stranded RNA assuming a state after the micro-RNA is cut by a Dicer, is introduced. Available products involving the use of these methods are miCENTURY OX Precursor (manufactured by B-Bridge Company), miCENTURY OX siMature (manufactured by B-Bridge Company), and miCENTURY OX miNatural (manufactured by B-Bridge Company).

### 6. Methods of Suppressing the Activity of a Nucleic Acid Such as Micro-RNA or Micro-RNA Precursor

[0100] The activation of a nucleic acid such as micro-RNA or micro-RNA precursor to be used in the present invention can be suppressed using an antisense technology (Bioscience and Industry, 50, 322 (1992); Kagaku, 46, 681 (1991), Biotechnology, 9, 358 (1992), Trends in Biotechnology, 10, 87 (1992), Trends in Biotechnology, 10, 152 (1992); Cell Technology, 16, 1463 (1997)], triple helix technology (Trends in Biotechnology, 10, 132 (1992)), ribozyme technology (Current Opinion in Chemical Biology, 3, 274 (1999), FEMS Microbiology Reviews, 23, 257 (1999), Frontiers in Bioscience, 4, D497 (1999), Chemistry & Biology, 6, R33 (1999), Nucleic Acids Research, 26, 5237 (1998), Trends In Biotechnology, 16, 438 (1998)), decoy DNA method (Nippon Rinsho—Japanese Journal of Clinical Medicine, 56, 563 (1998), Circulation Research, 82, 1023 (1998), Experimental Nephrology, 5, 429 (1997), Nippon Rinsho—Japanese Journal of Clinical Medicine, 54, 2583 (1996)), or a siRNA (short interfering RNA).

[0101] An antisense refers to one that allows nucleotide sequence-specific hybridization of a nucleic acid having a nucleotide sequence complementary to a certain target nucleic acid to enable the suppression of the expression of the target nucleic acid. As the nucleic acid used as the antisense, a DNA, an RNA or a nucleotide analogue, as well as a chimeric molecule thereof, or a derivative of the nucleic acid can also be used. Specifically, by preparing an antisense in accordance with a method described in Nature 432, 226 (2004) and the like, the expression can be suppressed. In addition, in the same way as with Anti-miR™ miRNA Inhibitors (manufactured by Ambion) and miRIDIAN miRNA Inhibitors (manufactured by GE Healthcare), the expression of a nucleic acid used in the present invention can be suppressed.

[0102] An siRNA refers to a short double-stranded RNA comprising the nucleotide sequence of a certain target nucleic acid, that is capable of suppressing the expression of the target nucleic acid by RNA interference (RNAi). The sequence of an siRNA can be designed as appropriate from the target nucleotide sequence on the basis of conditions shown in the literature (Genes Dev., 13, 3191 (1999)). By synthesizing two RNAs having a 19-nucleotide sequence selected and a complementary sequence, with TT added to the 3′ terminus of each thereof using a nucleic acid synthesizer, and performing annealing, an siRNA can be prepared. By inserting a DNA corresponding to the above-described 19-nucleotide sequence selected into an siRNA expression vector such as pSilencer 1.0-U6 (manufactured by Ambion) or pSUPER (manufactured by OligoEngine), a vector that expresses an siRNA capable of suppressing the expression of the gene can be prepared. Although any siRNA can be used to suppress a function of a nucleic acid, such as a micro-RNA, used in the present invention, as far as it is capable of suppressing the function of the nucleic acid, preference is given to an siRNA designed on the basis of sequence information on SEQ ID NO:1 to 3371. The number of nucleotide residues constituting one strand of the siRNA is preferably 17 to 30 residues, more preferably 18 to 25 residues, still more preferably 19 to 23 residues.

[0103] Using an antisense or siRNA specific for a nucleic acid such as micro-RNA expressed in mast cells, or a precursor of the micro-RNA, the expression of a micro-RNA expressed in mast cells, a precursor of the micro-RNA and the like can be suppressed. For example, by administering an antisense oligonucleotide or siRNA specific for the micro-RNA or the micro-RNA precursor, the activation of the micro-RNA can be suppressed, and the action of the micro-RNA or micro-RNA precursor in mast cells can be controlled.

[0104] In addition, in the case of a patient affected by an abnormality of the expression of a micro-RNA expressed in mast cells or a precursor thereof, by administering an antisense oligonucleotide or siRNA specific for the micro-RNA or precursor thereof to the patient, it is possible to control a function of mast cells to treat a disease that develops as a result of the above-described expression abnormality. Hence, an antisense oligonucleotide or siRNA that is specific for the micro-RNA or precursor thereof is useful as a therapeutic agent for a disease caused by a cell abnormality of mast cells.

[0105] When an antisense oligonucleotide or siRNA specific for a nucleic acid such as a micro-RNA or a precursor thereof is used as the above-described therapeutic agent, the antisense oligonucleotide or siRNA alone, or a nucleic acid that encodes the same after being inserted into an appropriate vector such as a retrovirus vector, adenovirus vector, or adeno-associated virus vector, may be prepared as a pharmaceutical preparation according to the conventional method described in 9 below, and administered.

### 7. Methods of Suppressing Functions or Expression of Target Genes Using a Nucleic Acid Such as Micro-RNA or Micro—RNA Precursor

[0106] Any method can be used to suppress a function or the expression of the target gene for a nucleic acid used in the present invention, as far as it is based on an activity of a nucleic acid such as a micro-RNA to suppress the expression of the mRNA having the target nucleotide sequence. For example, a method can be mentioned wherein a nucleic acid used in the present invention such as a micro-RNA is expressed to increase the amount of the nucleic acid such as the micro-RNA in cells, whereby the translation of the mRNA having the target sequence is suppressed to suppress the expression of the gene. The expression of a nucleic acid used in the present invention can be achieved by the method described in 5 above. As examples of mRNAs having a target nucleotide sequence for a nucleic acid consisting of a nucleotide sequence of any one of SEQ ID NOs:1-1543, and 3372-3741, the respective sets of genes shown in the foregoing Table 4 can be mentioned.

[0107] Using an siRNA against a target gene shown in Table 4, it is possible to suppress a function of the target gene.

8. Methods of Screening for Substances that Controls the Expression or a Function of a Nucleic Acid Such as a Micro-RNA or Micro-RNA Precursor Using the Nucleic Acid

[0108] A substance that controls, that is, promotes or suppresses the expression or a function of a nucleic acid such as a micro-RNA or a precursor thereof can be screened for using a nucleic acid used in the present invention. For example, a nucleotide sequence to be targeted for screening is chosen from the nucleotide sequence of a micro-RNA or a precursor thereof to be used in the present invention and by means of cells that express a nucleic acid having the nucleotide sequence, a substance that promotes or suppresses the expression or a function of the chosen micro-RNA or precursor thereof can be screened for.

[0109] As cells that express a nucleic acid having the nucleotide sequence of a micro-RNA or micro-RNA precursor, used for screening, mast cells, as well as transformant cells obtained by introducing a vector that expresses a nucleic acid having the nucleotide sequence into a host cell such as an animal cell or yeast, cells incorporating a nucleic acid having the nucleotide sequence introduced directly without using a vector and the like as described in 5 above can also be used.

[0110] As specific screening methods, a method comprising using a change in the expression level of a nucleic acid such as an micro-RNA or precursor thereof to be targeted in the screening as an index, as well as a method comprising using a change in the expression level of an mRNA having a target sequence for a nucleic acid such as a micro-RNA or a gene product encoded thereby as an index can be mentioned.

(a) Screening method comprising using a change in the expression level of a micro-RNA or precursor thereof to be targeted in the screening as an index

[0111] A test substance is brought into contact with a cell that expresses the nucleic acid, and with a change in the expression level of the nucleic acid selected as an index, a substance that promotes or suppresses the nucleic acid such as a micro-RNA and precursor thereof is obtained. The expression level of a nucleic acid can be detected by the method described in 3 above.

(b) Screening method comprising using a change in the expression level of an mRNA having a target sequence for a nucleic acid such as a micro-RNA to be targeted in the screening or a gene product encoded thereby as an index

[0112] A test substance is brought into contact with a cell that expresses the mRNA, and with a change in the expression level of an mRNA having a target sequence of the nucleic acid selected or a gene product encoded thereby as an index, a substance that promotes or suppresses the expression or a function of a nucleic acid such as a micro-RNA and a precursor thereof can be obtained. Alternatively, a DNA having a target sequence of a nucleic acid of the present invention such as micro-RNA inserted into the 3′ UTR of an appropriate reporter gene expression vector is prepared and introduced into a host cell suitable for the expression vector, a test substance is brought into contact with the cell, and with a change in the expression level of the reporter gene as an index, a substance that promotes or suppresses the expression or a function of a nucleic acid such as a micro-RNA and a precursor thereof can be obtained.

[0113] Choice of a target sequence can be achieved by the method described in 7 above; as examples of an mRNA having a target sequence of a nucleic acid such as a micro-RNA consisting of the nucleotide sequence of any one of SEQ ID NOs:1 to 1543 and 3372 to 3741, the above-described genes shown in Table 4 above can be exemplified.

### 9. Mast Cell Degranulation Control Agents Comprising a Nucleic Acid Such as a Micro-RNA or a Micro-RNA Precursor

[0114] Nucleic acids such as micro-RNAs and micro-RNA precursors and nucleic acids having nucleotide sequences complementary to the nucleotide sequences thereof, used in the present invention, can be used as mast cell degranulation control agents, that is, degranulation suppressants or degranulation promoters, because they control the expression of genes having a target sequence.

[0115] As active ingredients of mast cell degranulation suppressants, the nucleic acids (a) to (h) below can be mentioned.

(a) A nucleic acid consisting of a nucleotide sequence of any one of SEQ ID NOs:1 to 70, 151 to 581, 1238 to 1461, and 3407 to 3452.
(b) A nucleic acid of 17 to 28 nucleotides comprising a nucleic acid consisting of a nucleotide sequence of any one of SEQ ID NOs:1 to 70, 151 to 581, 1238 to 1461, and 3407 to 3452.
(c) A nucleic acid consisting of a nucleotide sequence having an identity of 90% or more to a nucleotide sequence of any one of SEQ ID NOs:1 to 70, 151 to 581, 1238 to 1461, and 3407 to 3452.
(d) A nucleic acid that hybridizes under stringent conditions with a complementary strand for a nucleic acid consisting of a nucleotide sequence of any one of SEQ ID NOs:1 to 70, 151 to 581, 1238 to 1461, and 3407 to 3452.
(e) A nucleic acid comprising the 2nd to 8th nucleotides of a nucleotide sequence of any one of SEQ ID NOs:1 to 70, 151 to 581, 1238 to 1461, and 3407 to 3452.
(f) A nucleic acid consisting of a nucleotide sequence of any one of SEQ ID NOs:1544 to 1621, 1634, 1665 to 1668, 1688, 1709 to 2196, 2862 to 2864, 2978 to 3287, 3365, and 3780 to 3828.
(g) A nucleic acid consisting of a nucleotide sequence having an identity of 90% or more to a nucleotide sequence of any one of SEQ ID NOs:1544 to 1621, 1634, 1665 to 1668, 1688, 1709 to 2196, 2862 to 2864, 2978 to 3287, 3365, and 3780 to 3828.
(h) A nucleic acid that hybridizes under stringent conditions with a complementary strand for a nucleic acid consisting of a nucleotide sequence of any one of SEQ ID NOs:1544 to 1621, 1634, 1665 to 1668, 1688, 1709 to 2196, 2862 to 2864, 2978 to 3287, 3365, and 3780 to 3828.

[0116] As the above-described nucleic acids, micro-RNAs and micro-RNA precursors are suitably used.

[0117] Substances that promote a function or the expression of the nucleic acids (a) to (h) above can also be used as mast cell degranulation suppressants.

[0118] Substances that suppress a function or the expression of a target gene for the nucleic acids (a) to (h) above can also be used as mast cell degranulation suppressants. As substances that suppress the expression of a target gene, an siRNA against the mRNA of the target gene, an antisense against the target gene, and the like can be mentioned.

[0119] Meanwhile, substances that suppress a function or the expression of the nucleic acids (i) to (p) below can also be used as mast cell degranulation suppressants. As substances that suppress a function or the expression of the nucleic acids, siRNAs and antisenses against the nucleic acids, and the like can be mentioned.

[0120] As active ingredients of mast cell degranulation promoters, the nucleic acids (i) to (p) below can be mentioned.

(i) A nucleic acid consisting of a nucleotide sequence of any one of SEQ ID NOs:71 to 150, 582 to 1237, 1462 to 1543, 3372 to 3406, and 3453 to 3741.
(j) A nucleic acid of 17 to 28 nucleotides comprising a nucleic acid consisting of a nucleotide sequence of any one of SEQ ID NOs:71 to 150, 582 to 1237, 1462 to 1543, 3372 to 3406, and 3453 to 3741.
(k) A nucleic acid consisting of a nucleotide sequence having an identity of 90% or more to a nucleotide sequence of any one of SEQ ID NOs:71 to 150, 582 to 1237, 1462 to 1543, 3372 to 3406, and 3453 to 3741.
(l) A nucleic acid that hybridizes under stringent conditions with a complementary strand for a nucleic acid consisting of a nucleotide sequence of any one of SEQ ID NOs:71 to 150, 582 to 1237, 1462 to 1543, 3372 to 3406, and 3453 to 3741.
(m) A nucleic acid comprising the 2nd to 8th nucleotides of a nucleotide sequence of any one of SEQ ID NOs:71 to 150, 582 to 1237, 1462 to 1543, 3372 to 3406, and 3453 to 3741.
(n) A nucleic acid consisting of a nucleotide sequence of any one of SEQ ID NOs:1557, 1575, 1590, 1592 to 1593, 1622 to 1708, 1919 to 1925, 1927 to 1929, 2112, 2197 to 2977, 3092 to 3093, 3162 to 3163, 3169, 3177, 3281, 3288 to 3371, 3742 to 3779, 3790 to 3792, 3807, and 3829 to 4147.
(o) A nucleic acid consisting of a nucleotide sequence having an identity of 90% or more to a nucleotide sequence of any one of SEQ ID NOs:1557, 1575, 1590, 1592 to 1593, 1622 to 1708, 1919 to 1925, 1927 to 1929, 2112, 2197 to 2977, 3092 to 3093, 3162 to 3163, 3169, 3177, 3281, 3288 to 3371, 3742 to 3779, 3790 to 3792, 3807, and 3829 to 4147.
(p) A nucleic acid that hybridizes under stringent conditions with a complementary strand for a nucleic acid consisting of a nucleotide sequence of any one of SEQ ID NOs:1557, 1575, 1590, 1592 to 1593, 1622 to 1708, 1919 to 1925, 1927 to 1929, 2112, 2197 to 2977, 3092 to 3093, 3162 to 3163, 3169, 3177, 3281, 3288 to 3371, 3742 to 3779, 3790 to 3792, 3807, and 3829 to 4147.

[0121] As the above-described nucleic acids, micro-RNAs and micro-RNA precursors are suitably used.

[0122] Substances that promote a function or the expression of the nucleic acids (i) to (p) above can also be used as mast cell degranulation promoters.

[0123] Substances that suppress a function or the expression of a target gene for the nucleic acids (i) to (p) above can also be used as mast cell degranulation promoters. As substances that suppress the expression of a target gene, an siRNA against the mRNA of the target gene, an antisense against the target gene and the like can be mentioned.

[0124] Meanwhile, substances that suppress a function or the expression of the nucleic acids (a) to (h) above can also be used as mast cell degranulation promoters. As substances that suppress a function or the expression of the nucleic acids, an siRNA and antisense against the nucleic acids and the like can be mentioned.

[0125] As a mast cell degranulation control agent of the present invention, a vector that expresses one of the nucleic acids (a) to (h) and (i) to (p) above can also be used.

[0126] Regarding the preparation forms, methods of administration and the like for the mast cell degranulation control agents of the present invention, the same applies as with the diagnostic agents and therapeutic agents containing a nucleic acid such as a micro-RNA or a micro-RNA precursor, described in 10 below.

### 10. Diagnostic Agents and Therapeutic Agents Containing a Nucleic Acid Such as a Micro-RNA or a Micro-RNA Precursor

[0127] Nucleic acids, such as micro-RNAs and micro-RNA precursors, used in the present invention can be used as therapeutic agents for diseases resulting from a mast cell abnormality and the like, because they control the expression of genes having a target sequence, or control the expression of nucleic acids, such as micro-RNAs, used in the present invention. Also, siRNAs against a target gene for the nucleic acids can be used as therapeutic agents for diseases resulting from a mast cell abnormality and the like because they control the expression of the gene. As mast cell abnormalities, abnormalities of mast cell differentiation and degranulation, inflammatory mediator production, cytokine production, chemokine production and the like can be mentioned; as diseases caused thereby, atopic dermatitis, asthma, chronic obstructive lung disease, allergic disease and the like can be mentioned.

[0128] By quantifying a nucleic acid of the present invention or detecting a mutation therein, a disease resulting from a mast cell abnormality and the like can be diagnosed.

[0129] A diagnostic agent comprising a nucleic acid of the present invention, according to the desired diagnostic method, may comprise reagents necessary for quantitation or detection of mutation of a nucleic acid used in the present invention, for example, buffering agents, salts, reaction enzymes, labeled proteins that bind to a nucleic acid of the present invention, and a color developer for detection and the like.

[0130] Although a therapeutic agent containing as an active ingredient a nucleic acid used in the present invention can be administered alone, the same is normally desirably administered as a pharmaceutical preparation produced by an optionally chosen method known well in the technical field of pharmaceutical making with one or more pharmacologically acceptable carriers blended therein.

[0131] The route of administration used is desirably the most effective one in treatment; oral administration, or parenteral administration such as intraoral administration, airway administration, intrarectal administration, subcutaneous administration, intramuscular administration and intravenous administration can be mentioned, and desirably intravenous administration can be mentioned.

[0132] As dosage forms, sprays, capsules, tablets, granules, syrups, emulsions, suppositories, injection formulations, ointments, tapes and the like can be mentioned. As preparations appropriate for oral administration, emulsions, syrups, capsules, tablets, powders, granules and the like can be mentioned.

[0133] Liquid preparations like emulsions and syrups can be produced using water, saccharides such as sucrose, sorbitol, and fructose, glycols such as polyethylene glycol and propylene glycol, oils such as sesame oil, olive oil, and soybean oil, antiseptics such as p-hydroxybenzoic acid esters, flavors such as strawberry flavor and peppermint and the like as additives.

[0134] Capsules, tablets, powders, granules and the like can be produced using excipients such as lactose, glucose, sucrose, and mannitol, disintegrants such as starch and sodium alginate, lubricants such as magnesium stearate and talc, binders such as polyvinyl alcohol, hydroxypropylcellulose, and gelatin, surfactants such as fatty acid esters, plasticizers such as glycerin and the like as additives.

[0135] As appropriate preparations for parenteral administration, injection formulations, suppositories, sprays and the like can be mentioned.

[0136] An injection formulation is prepared using a carrier consisting of a salt solution, a glucose solution or a mixture of both and the like. A suppository is prepared using a carrier such as cacao butter, hydrogenated fat or carboxylic acid. A spray is prepared using a carrier that does not stimulate the recipient's oral cavity and airway mucosa, and that disperses the active ingredients as fine particles to facilitate the absorption thereof, and the like.

[0137] As examples of the carrier, specifically, lactose, glycerin and the like can be exemplified. Depending on the nature of the nucleic acid used in the present invention, and of the carrier used, preparations such as aerosols and dry powders are possible. In these parenteral preparations, components exemplified as additives for oral preparations can also be added.

[0138] The dose or frequency of administration varies depending on desired therapeutic effect, method of administration, duration of treatment, age, body weight and the like, and is normally 10 μg/kg to 20 mg/kg per day for an adult.

[0139] A therapeutic agent containing as an active ingredient a nucleic acid used in the present invention can also be produced by blending a vector that expresses the nucleic acid used in the present invention and a base for nucleic acid-based therapeutic agents (Nature Genet., 8, 42 (1994)).

[0140] The base used in the therapeutic agent of the present invention may be any base for ordinary use in injection formulations; distilled water, solutions of salts such as sodium chloride or a mixture of sodium chloride and an inorganic salt, solutions of mannitol, lactose, dextran, glucose and the like, solutions of amino acids such as glycine and arginine, mixed solutions of organic acid solutions or salt solutions and glucose solution and the like can be mentioned. In accordance with a conventional method, using auxiliary agents such as an osmoregulator, a pH adjuster, a vegetable oil such as sesame oil or soybean oil, lecithin, and a surfactant such as a non-ionic surfactant in these bases, an injection formulation may be prepared as a solution, suspension, or dispersion. These injection formulations can also be prepared as preparations for dissolution before use, by procedures such as powdering and lyophilization. A therapeutic agent of the present invention can be used for treatment as is in the case of a liquid, or after being dissolved in a base described above, optionally sterilized, in the case of a solid, just before treatment.

[0141] As a vector that expresses a nucleic acid used in the present invention, the recombinant viral vector prepared by the method described in 5 above can be mentioned, more specifically, a retrovirus vector and a lentivirus vector and the like can be mentioned.

[0142] In addition, by combining a nucleic acid used in the present invention with a polylysine-conjugated antibody that is specific for adenovirus hexon protein to prepare a complex, and binding the complex obtained to an adenovirus vector, a viral vector can be prepared. The viral vector is capable of stably reaching the desired cell, being incorporated into cells by endosome, being decomposed in the cells, and efficiently expressing the nucleic acid.

[0143] A viral vector based on Sendai virus, which is a (−) strand RNA virus, has been developed (WO97/16538, WO97/16539); using the Sendai virus, a Sendai virus vector that expresses a nucleic acid used in the present invention can be prepared.

[0144] A nucleic acid used in the present invention can also be introduced by a non-viral nucleic acid introduction method. The same can be introduced by, for example, calcium phosphate co-precipitation (Virology, 52, 456-467 (1973); Science, 209, 1414-1422 (1980)], microinjection method (Proc. Natl. Acad. Sci. USA, 77, 5399-5403 (1980); Proc. Natl. Acad. Sci. USA, 77, 7380-7384 (1980); Cell, 27, 223-231 (1981); Nature, 294, 92-94 (1981)), membrane fusion-mediated introduction mediated by liposome (Proc. Natl. Acad. Sci. USA, 84, 7413-7417 (1987); Biochemistry, 28, 9508-9514 (1989); J. Biol. Chem., 264, 12126-12129 (1989); Hum. Gene Ther., 3, 267-275, (1992); Science, 249, 1285-1288 (1990); Circulation, 83, 2007-2011 (1992)) or direct DNA uptake and receptor-mediated DNA introduction method (Science, 247, 1465-1468 (1990); J. Biol. Chem., 266, 14338-14342 (1991); Proc. Natl. Acad. Sci. USA, 87, 3655-3659 (1991); J. Biol. Chem., 264, 16985-16987 (1989); BioTechniques, 11, 474-485 (1991); Proc. Natl. Acad. Sci. USA, 87, 3410-3414 (1990); Proc. Natl. Acad. Sci. USA, 88, 4255-4259 (1991); Proc. Natl. Acad. Sci. USA, 87, 4033-4037 (1990); Proc. Natl. Acad. Sci. USA, 88, 8850-8854 (1991); Hum. Gene Ther., 3, 147-154 (1991)) and the like.

[0145] Membrane fusion-mediated introduction mediated by liposome allows a nucleic acid used in the present invention to be incorporated locally in the tissue, and to be expressed, by administering a liposome preparation directly to the target tissue (Hum. Gene Ther., 3, 399 (1992)). For direct targeting of a nucleic acid to a focus, a technology including direct uptake of nucleic acid is preferable.

[0146] For receptor-mediated nucleic acid introduction, for example, a method performed by binding a nucleic acid to a protein ligand via polylysine can be mentioned. A ligand is chosen on the basis of the presence of a corresponding ligand receptor on the cell surface of the desired cell or tissue. The ligand-nucleic acid conjugate can be injected directly into a blood vessel as desired, and can be directed to a target tissue wherein receptor binding and nucleic acid-protein complex internalization occur. To prevent the destruction of the nucleic acid in a cell, an adenovirus may be infected simultaneously to destroy the endosome function.

### 11. Method of Measuring the Degree of Mast Cell Activation

[0147] The fact that a nucleic acid such as a micro-RNA or a micro-RNA precursor exhibits at least one of the actions of activation suppression, degranulation suppression, inflammatory mediator production suppression, cytokine production suppression, and chemokine production suppression on mast cells can be confirmed by, for example, introducing a nucleic acid used in the present invention or an siRNA against a target gene for the nucleic acid, into a mast cell, thereafter stimulating the mast cell, measuring a released substance such as (i) histamine or β-hexosaminidase, which can be an index of degranulation, (ii) an inflammatory mediator such as LTC4, LTD4, LTE4, or PGD2, (iii) a cytokine such as TNF-α or GM-CSF, or (iv) a chemokine such as IL-8, 1-309, or MIP-1α, and comparing the result with that obtained when the nucleic acid used in the present invention, or the siRNA against the target gene for the nucleic acid, is not introduced.

[0148] Also, by introducing a nucleic acid, micro RNA or micro-RNA precursor used in the present invention, or an siRNA for a target gene of the micro-RNA, into a mast cell, and detecting the induction of apoptosis by a measurement of the fragmentation of chromatin DNA, the TUNEL method and the like, the fact that the siRNA possesses apoptosis inducing action can be confirmed.

[0149] The fact can also be confirmed by introducing a nucleic acid used in the present invention or an siRNA against a target gene for the nucleic acid into a mast cell in the presence of a substance that suppresses the activation of mast cells, thereafter stimulating the mast cell, and comparing the result with that obtained when the nucleic acid used in the present invention or the siRNA against a target gene for the nucleic acid is not introduced.

[0150] As example of methods of stimulating a mast cell, a method wherein an anti-IgE antibody is added after the cell is cultured with the addition of IgE, a method wherein Compound 48/80 is added, a method wherein polymyxin B is added, a method wherein dextran is added, a method wherein a calcium ionophore is added, a method wherein acetylcholine is added, a method wherein carbachol is added, a method wherein thrombin is added, a method wherein concanavalin A is added, a method wherein a calcium ionophore is added, a method wherein ATP is added, a method wherein doxorubicin is added, and the like can be mentioned. As examples of substances that suppress the activation of mast cells, substances that inhibit the process wherein a micro-RNA is biosynthesized from a micro-RNA precursor can be mentioned.

[0151] Mast cell activation can also be examined by measuring, in place of degranulation, production of cytokines such as TNF-α and GM-CSF, production of chemokines such as IL-8, 1-309, and MIP-1α, production of inflammatory mediators such as LTC4, LTD4, LTE4, and PGD2 and the like [Blood, 100, 3861 (2002)].

[0152] The present invention is hereinafter described specifically by means of the following Examples. However, the present invention is not limited to these Examples.

### Example 1

### Action of Forcible Expression of Micro-RNA Precursor on Degranulation of Human Mast Cells

[0153] A human micro-RNA precursor was introduced into the human mast cell line LAD2, and the influence of the micro-RNA precursor on the degranulation was examined.

[0154] LAD2, a recently established human mast cell line, is known to well retain the nature of human mast cells (Leuk. Res., 27, 671 (2003); Leuk. Res., 27, 677 (2003)). LAD2 was obtained from the National Institute of Allergy and Infectious Diseases, National Institutes of Health (Bethesda, Md. 20892-1881, USA), and cultured using Stem Pro-34 medium (manufactured by Invitrogen Company) containing 100 ng/mLSCF.

[0155] LAD2 was seeded to a 96-well plate at 4×10³ cells per well, a micro-RNA precursor was introduced using a lipofection method, specifically TransIT-TKO (manufactured by Mirus Company), to obtain a final concentration of 25 nM. The micro-RNA precursors used were human micro-RNA library Ver.1 and Ver.2 synthesized at Ambion Company. Lipofection was performed according to the method described in the instruction manual attached to the product.

[0156] Two days after the introduction of the micro-RNA precursor by the lipofection method, human myeloma IgE (manufactured by Cosmo Bio Company) was added to obtain a final concentration of 0.3 μg/mL, and the cells were cultured overnight in an incubator at 37° C. and a 5% CO₂ concentration. The following day, a rabbit antihuman IgE antibody (manufactured by DAKO Company) was added to obtain a final concentration of 10 μg/mL, and the cells were incubated for 30 minutes in an incubator at 37° C. and a 5% CO₂ concentration to induce degranulation. Degrees of degranulation were evaluated by measuring the β-hexosaminidase activity of the enzyme in the granules released in the medium. A measurement of the β-hexosaminidase activity was performed by adding to the medium 40 μL of 20 mmol/L 4-methylumbelliferyl-N-acetyl-β-D-glucosaminide (manufactured by Sigma Company) dissolved in the Tyrode buffer solution (126.1 mmol/L NaCl, 4.0 mmol/L KCl, 1.0 mmol/L CaCl₂, 0.6 mmol/L MgCl₂, 0.6 mmol/L KH₂PO₄, 10 mM HEPES, 5.6 mmol/L D-glucose, 0.1% bovine serum albumin, pH 7.4), incubating the cells at 37° C. for 3 hours, thereafter determining the absorbance at 450 nm using the plate reader EnVision (manufactured by Perkin-Elmer Company). After the measurement, Triton X-100 was added to the medium to obtain a final concentration of 1%, and the same experiment was performed, whereby the total β-hexosaminidase activity contained in LAD2 was measured. The ratio of degranulation induced by the anti-IgE antibody was calculated as the ratio (%) to the total β-hexosaminidase activity released with 1% Triton X-100. The relative activity of degranulation was evaluated by the deviation from the median by a calculation of subtracting the median from the degranulation efficiency, and dividing the difference by the mean deviation. Degranulation promoting activity was expressed with plus symbols, and degranulation suppressing activity with minus symbols.

[0157] Two independent experiments were performed; the results are shown in Table 5-1 to Table 5-2.

TABLE 5-1

| | relative activity | |
|---|---|---|
| | of degranulation | |
| introduced micro-RNA | first time | second time |
| hsa-miR-593 | −4.42 | −4.65 |
| hsa-miR-34a | −3.51 | −3.04 |
| hsa-miR-634 | −3.47 | −3.29 |
| hsa-miR-449b | −3.17 | −2.23 |
| hsa-miR-654 | −3.03 | −0.73 |
| hsa-miR-140 | −2.92 | −0.81 |
| hsa-miR-25 | −2.78 | −3.02 |
| hsa-miR-338 | −2.70 | −0.86 |
| hsa-miR-199a | −2.61 | −2.78 |
| hsa-miR-658 | −2.59 | −1.49 |
| hsa-miR-328 | −2.57 | −1.18 |
| hsa-miR-587 | −2.57 | −1.62 |
| hsa-miR-208 | −2.51 | −0.61 |
| hsa-miR-214 | −2.46 | −1.51 |
| hsa-miR-199b | −2.40 | −1.95 |
| hsa-miR-18a | −2.40 | −3.94 |
| hsa-miR-660 | −2.36 | −1.60 |
| hsa-miR-595 | −2.33 | −1.55 |
| haa-miR-525* | −2.32 | −1.67 |
| hsa-miR-647 | −2.11 | −1.29 |
| hsa-miR-625 | −2.10 | −2.65 |
| hsa-miR-520d | −2.09 | −0.10 |
| hsa-miR-18b | −2.06 | −3.26 |
| hsa-miR-21 | −2.06 | −1.07 |
| hsa-miR-210 | −2.02 | −0.48 |
| hsa-miR-345 | −1.91 | −1.70 |
| hsa-miR-765 | −1.88 | −1.85 |
| hsa-miR-329 | −1.85 | −1.53 |
| hsa-miR-218 | −1.77 | −2.81 |
| hsa-miR-604 | −1.76 | −1.53 |
| hsa-miR-635 | −1.75 | −2.26 |
| hsa-miR-668 | −1.62 | −1.78 |
| hsa-miR-573 | −1.58 | −2.16 |
| hsa-miR-517* | −1.41 | −2.38 |
| hsa-miR-637 | −1.13 | −2.38 |
| hsa-miR-211 | −1.10 | −1.39 |
| hsa-miR-17-3p | −0.76 | −2.05 |
| hsa-miR-515-3p | −0.74 | −2.34 |
| hsa-miR-486 | −0.69 | −2.72 |
| hsa-miR-16 | −0.65 | −3.31 |
| hsa-miR-485-5p | −0.14 | −2.48 |
| hsa-miR-510 | −0.09 | −2.68 |
| hsa-miR-200a* | 0.31 | 2,32 |
| hsa-miR-378 | 0.48 | 4.12 |
| hsa-miR-223 | 0.66. | 2.50 |
| hsa-miR-596 | 0.66 | 2.05 |
| hsa-miR-409-3p | 0.68 | 2.65 |
| hsa-miR-27b | 0.70 | 2.85 |
| hsa-miR-449 | 0.70 | −2.11 |
| hsa-miR-613 | 0.79 | 2.12 |
| hsa-miR-146a | 0.93 | 2.09 |
| hsa-miR-429 | 0.97 | 2.08 |
| hsa-miR-544 | 1.09 | 2.43 |

TABLE 5-2

| | relative activity | |
|---|---|---|
| | of degranulation | |
| introduced micro-RNA | first time | second time |
| hsa-miR-617 | 1.12 | 2.57 |
| hsa-miR-106a | 1.17 | 2.07 |
| hsa-miR-632 | 1.26 | 2.74 |
| hsa-miR-374 | 1.57 | 1.55 |
| hsa-miR-135b | 1.72 | 1.56 |
| hsa-miR-181a | 1.73 | 1.91 |
| hsa-miR-296 | 1.77 | 1.52 |
| hsa-miR-550 | 1.80 | 2.37 |
| hsa-miR-133b | 1.85 | 2.06 |
| hsa-miR-376a | 1.94 | 2.80 |
| hsa-miR-206 | 2.06 | 3.09 |
| hsa-miR-28 | 2.08 | 2.01 |
| hsa-miR-127 | 2.09 | 1.28 |
| hsa-miR-518o | 2.09 | 0.68 |
| hsa-miR-450 | 2.11 | 0.08 |
| hsa-miR-487b | 2.12 | 2.67 |
| hsa-miR-362 | 2.12 | −0.08 |
| hsa-let-7e | 2.45 | 0.46 |
| hsa-miR-33b | 2.47 | 2.39 |
| hsa-miR-216 | 2.62 | 1.84 |
| hsa-miR-373* | 2.80 | 0.32 |
| hsa-miR-182* | 2.82 | 1.18 |
| hsa-miR-146b | 2.87 | 1.63 |
| hsa-miR-1 | 3.23 | 3.69 |
| hsa-miR-659 | 3.71 | 3.41 |
| hsa-miR-126* | 3.73 | 4.52 |

[0158] Seven days after the introduction of the micro-RNA precursor as well, human myeloma IgE (manufactured by Cosmo Bio Company) was added to obtain a final concentration of 0.3 μg/ml, and the cells were cultured overnight in an incubator at 37° C. and a 5% CO₂ concentration; the following day, degranulation was induced by the addition of a rabbit antihuman IgE antibody, and the ratio of degranulation was measured. The results are shown in Table 6-1 to Table 6-2.

TABLE 6-1

| | relative activity | |
|---|---|---|
| | of degranulation | |
| introduced micro-RNA | first time | second time |
| hsa-miR-593 | −6.23 | −4.03 |
| hsa-miR-634 | −3.91 | −3.29 |
| hs-a-miR-647 | −3.14 | −1.75 |
| hsa-miR-595 | −2.70 | −1.60 |
| hsa-miR-190 | −2.50 | −2.22 |
| hsa-miR-587 | −2.48 | −1.87 |
| hsa-miR-658 | −2.43 | −2.46 |
| hsa-miR-25 | −2.33 | −3.04 |
| hsa-miR-329 | −2.32 | −1.69 |
| hsa-miR-520h | −2.25 | −0.68 |
| hsa-miR-195 | −2.23 | −1.44 |
| hsa-miR-325 | −2.22 | −1.55 |
| hsa-miR-449b | −2.19 | −1.66 |
| hsa-miR-199a | −2.16 | −3.53 |
| hsa-miR-425-5p | −2.15 | −1.82 |
| hsa-miR-299-5p | −2.07 | −1.53 |
| hsa-miR-202* | −2.05 | −1.08 |
| hsa-miR-211 | −2.04 | −1.47 |
| hsa-miR-520f | −1.96 | −2.00 |
| hsa-miR-26b | −1.94 | −2.07 |
| hsa-miR-32 | −1.93 | −1.92 |
| hsa-miR-484 | −1.72 | −2.47 |
| hsa-miR-612 | −1.64 | −2.45 |
| hsa-miR-214 | −1.59 | −1.69 |
| hsa-miR-30a-3p | −1.59 | −1.98 |
| hsa-miR-522 | −1.58 | −1.53 |
| hsa-miR-515-5p | −1.50 | −2.18 |
| isa-miR-199b | −1.49 | −2.49 |
| hsa-miR-107 | −1.45 | −2.09 |
| hsa-miR-24 | −1.33 | −2.63 |
| hsa-miR-20b | −1.26 | −2.12 |
| hsa-miR-488 | −1.18 | −2.37 |
| hsa-miR-675 | −1.13 | −2.71 |
| hsa-miR-766 | −0.86 | −4.41 |
| hsa-miR-486 | −0.57 | −2.18 |
| hsa-miR-148b | −0.15 | −2.08 |
| hsa-miR-514 | −0.04 | 2.18 |
| hsa-miR-650 | 0.14 | −2.34 |
| hsa-miR-524* | 0.64 | 2.92 |
| hsa-miR-133a | 0.74 | 2.55 |
| hsa-miR-432* | 0.82 | 2.09 |
| hsa-miR-448 | 0.85 | 3.29 |
| hsa-miR-489 | 0.93 | 2.03 |
| hsa-miR-192 | 1.02 | 2.37 |
| hsa-miR-550 | 1.18 | 2.54 |
| hsa-miR-128b | 1.31 | 2.78 |
| hsa-miR-31 | 1.42 | 2.10 |
| hsa-miR-542-3p | 1.51 | 2.68 |
| hsa-miR-27b | 1.52 | 2.58 |
| hsa-miR-220 | 1.53 | 1.82 |
| hsa-miR-409-3p | 1.53 | 2.36 |
| hsa-miR-33b | 1.54 | 2.07 |
| hsa-miR-187 | 1.54 | 1.71 |

TABLE 6-2

| | relative activity | |
|---|---|---|
| | of degranulation | |
| introduced micro-RNA | first time | second time |
| hsa-miR-452 | 1.69 | 2.11 |
| hsa-miR-450 | 1.72 | 1.79 |
| hsa-miR-517o | 1.79 | 2.62 |
| hsa-miR-451 | 1.85 | 2.15 |
| hsa-miR-609 | 1.88 | 1.81 |
| hsa-miR-215 | 1.92 | 3.26 |
| hsa-miR-552 | 1.92 | 1.64 |
| hsa-miR-100 | 1.94 | 1.75 |
| hsa-miR-409-5p | 2.04 | 0.84 |
| hsa-miR-608 | 2.04 | 0.37 |
| hsa-miR-142-5p | 2.07 | 2.50 |
| hsa-miR-224 | 2.09 | 2.21 |
| hsa-miR-601 | 2.10 | 1.63 |
| hsa-miR-545 | 2.11 | 1.97 |
| hsa-miR-28 | 2.12 | 1.26 |
| hsa-miR-96 | 2.16 | 1.90 |
| hsa-miR-129 | 2.16 | 3.08 |
| hsa-m1R-487b | 2.20 | 2.61 |
| hsa-let-7e | 2.25 | −0.14 |
| hsa-miR-223 | 2.26 | 1.23 |
| hsa-miR-181a | 2.26 | 1.38 |
| hsa-miR-801 | 2.27 | 1.90 |
| hsa-miR-136 | 2.31 | 0.22 |
| hsa-miR-183 | 2.34 | 1.66 |
| hsa-miR-9 | 2.35 | 1.94 |
| hsa-miR-302o* | 2.37 | 0.92 |
| hsa-miR-133b | 2.38 | 3.02 |
| hsa-miR-1 | 2.39 | 2.59 |
| hsa-miR-769-5p | 2.40 | 1.18 |
| hsa-miR-627 | 2.46 | 1.55 |
| hsa-miR-302b* | 2.47 | −0.25 |
| hsa-miR-222 | 2.54 | 2.14 |
| hsa-miR-217 | 2.65 | 0.86 |
| hsa-miR-378 | 2.66 | 2.93 |
| hsa-miR-23b | 2.71 | −1.04 |
| hsa-miR-644 | 2.88 | 1.45 |
| hsa-miR-182* | 3.11 | 4.32 |
| hsa-miR-216 | 3.34 | 0.70 |
| hsa-miR-659 | 3.77 | 2.95 |

[0159] These results revealed that the ratio of degranulation decreased with the introduction of micro-RNA precursors corresponding to hsa-miR-16, 195, 17-3p, 18a, 18b, 20b, 21, 24, 25, 32, 26b, 30a-3p, 34a, 449, 449b, 107, 140, 148b, 190, 199a, 199b, 202*, 208, 210, 211, 214, 218, 299-5p, 325, 328, 329, 338, 345, 425-5p, 484, 485-5p, 486, 488, 510, 515-3p, 515-5p, 517*, 520d, 520f, 520h, 522, 525*, 573, 587, 593, 595, 604, 612, 625, 634, 635, 637, 647, 650, 654, 658, 660, 668, 675, 765, and 766 (these are nucleic acids consisting of the nucleotide sequences of SEQ ID NOs:1 to 66, respectively), and conversely the ratio of degranulation increased with the introduction of micro-RNA precursors corresponding to hsa-let-7e, hsa-miR-1, 206, 613, 9, 23b, 27b, 28, 31, 33b, 96, 100, 106a, 126*, 127, 128b, 129, 133a, 133b, 135b, 136, 142-5p, 146a, 181a, 182*, 183, 187, 192, 215, 200a*, 216, 217, 220, 222, 223, 224, 296, 302b*, 302c*, 362, 373*, 374, 376a, 378, 409-3p, 409-5p, 429, 432*, 448, 450, 451, 452, 487b, 489, 514, 517c, 518c, 524*, 542-3p, 544, 545, 550, 552, 596, 601, 608, 609, 617, 627, 632, 644, 659, 769-5p, and 801 (these are nucleic acids consisting of the nucleotide sequences of SEQ ID NOs:71 to 118 and 120 to 146).

[0160] A measurement of degranulation activity using a 6-well plate was also performed. LAD2 was seeded to a 6-well plate at 5×10⁵ cells per well, a micro-RNA precursor was introduced using a lipofection method, specifically Gene Silencer (manufactured by Genlantis Company), to obtain a final concentration of 25 nM. The micro-RNA precursors used were Pre-miR™ miRNA Precursor Molecules synthesized at Ambion Company. Lipofection was performed according to the method described in the instruction manual attached to the product.

[0161] Two days after the introduction of the micro-RNA precursor by the lipofection method, 1.0 μg/ml human myeloma IgE (manufactured by Cosmo Bio Company) was added, and the cells were cultured overnight in an incubator at 37° C. and a 5% CO₂ concentration. The following day, the medium was removed via centrifugation, and the plate was washed with the Tyrode buffer solution (126.1 mmol/L NaCl, 4.0 mmol/L KCl, 1.0 mmol/L CaCl₂, 0.6 mmol/L MgCl₂, 0.6 mmol/L KH₂PO₄, 10 mM HEPES, 5.6 mmol/L D-glucose, 0.1% bovine serum albumin, pH 7.4), after which the cells were suspended by the addition of 1.5 mL of the Tyrode buffer solution, and the suspension was dispensed to a 96-well plate at 100 μL per well. Subsequently, a rabbit antihuman IgE antibody (manufactured by DAKO Company) was added to obtain a final concentration of 10 μg/mL, and the cells were incubated for 20 minutes in an incubator at 37° C. and a 5% CO₂ concentration to induce degranulation. The supernatant was recovered via centrifugation, and the β-hexosaminidase activity in the supernatant was measured to determine the degree of degranulation.

[0162] The β-hexosaminidase activity was evaluated by adding to 50 μL of the recovered supernatant 50 μl, of 4 mmol/L p-nitrophenyl-N-acetyl-β-glucosaminide (manufactured by Sigma Company) dissolved in 40 mmol/L citrate solution (pH 4.5), and incubating the supernatant at 37° C. for 1 hour, thereafter measuring the absorbance of a sample supplemented with 100 μL of 0.2 mol/L glycine (pH 10.7) at 405 nm using the plate reader 1420 ARVOsx (manufactured by Perkin-Elmer Company). Separately, Triton X-100 was added at a final concentration of 1% in place of the rabbit antihuman IgE antibody, and the same experiment was performed, whereby the total β-hexosaminidase activity in LAD2 was measured. The ratio of degranulation was calculated as the ratio (%) of the β-hexosaminidase activity in the supernatant to the total β-hexosaminidase activity, and the relative activity of degranulation was calculated for each precursor with the ratio of degranulation in a negative control plot (Gene Silencer only) taken as 1.0.

[0163] Seven days after the introduction of the micro-RNA precursor, human myeloma IgE (manufactured by Cosmo Bio Company) was added to obtain a final concentration of 1.0 μg/mL, and the cells were cultured overnight in an incubator at 37° C. and a 5% CO₂ concentration; the following day, a rabbit antihuman IgE antibody was added to induce degranulation, the ratio of degranulation was measured, and the relative activity of degranulation was calculated for each precursor with the ratio of degranulation in a negative control plot (Gene Silencer only) taken as 1.0.

[0164] The results for the relative activity of degranulation at 3 days and 8 days after the introduction of each micro-RNA precursor are shown in Table 7.

TABLE 7

| | |
|---|---|
| | relative activity |
| introduced | of degranulation |

| micro-RNA/siRNA | 3 days later | 5 days later |
|---|---|---|
| hsa-miR-197 | 0.52 | 0.62 |
| hsa-miR-221 | 0.60 | 0.63 |
| hsa-miR-200a | 1.17 | 2.16 |
| hsa-miR-200c | 1.64 | 2.73 |
| hsa-miR-142-3p | 1.71 | 2.94 |
| hsa-miR-361 | 1.82 | 1.13 |

[0165] As shown in Table 7, it was found that the ratio of degranulation increased with the introduction of micro-RNA precursors corresponding to hsa-miR-200c, 142-3p, 200a, and 361 (these are nucleic acids consisting of the nucleotide sequences of SEQ ID NOs:119 and 148 to 150, respectively), and that conversely the ratio of degranulation decreased with the introduction of hsa-miR-197 and 221 (these are nucleic acids consisting of the nucleotide sequences of SEQ ID NOs:69 and 70, respectively).

### Example 2

### Degranulation Activity in Human Mast Cells with Micro-RNA Antisense Introduced Thereto

[0166] Each of antisense oligonucleotides against hsa-miR-194, hsa-miR-500 and hsa-miR-365 (these are nucleic acids consisting of the nucleotide sequences of SEQ ID NOs: 67, 68 and 147, respectively) was introduced into LAD2 using a lipofection method to obtain a final concentration of 25 nM. The micro-RNA antisense oligonucleotides used were Anti-miR™miRNA Inhibitors (manufactured by Ambion Company). Lipofection was performed according to the method described in the instruction manual attached to the product.

[0167] Two days after the introduction of the micro-RNA antisense oligonucleotide by the lipofection method, human myeloma IgE (manufactured by Cosmo Bio Company) was added to obtain a final concentration of 0.3 μg/ml, and the cells were cultured overnight in an incubator at 37° C. and a 5% CO₂ concentration. The following day, a rabbit antihuman IgE antibody (manufactured by DAKO Company) was added to obtain a final concentration of 10 μg/mL, and the cells were incubated for 30 minutes in an incubator at 37° C. and a 5% CO₂ concentration to induce degranulation. Degrees of degranulation were evaluated by measuring the β-hexosaminidase activity of the enzyme in the granules released into the medium. The measurement of the β-hexosaminidase activity was performed by adding to the medium 40 μL of 20 mmol/L 4-methylumbelliferyl-N-acetyl-β-D-glucosaminide (manufactured by Sigma Company) dissolved in the Tyrode buffer solution (126.1 mmol/L NaCl, 4.0 mmol/L KCl, 1.0 mmol/L CaCl, 0.6 mmol/L MgCl₂, 0.6 mmol/L KH₂PO₄, 10 mM HEPES, 5.6 mmol/L D-glucose, 0.1% bovine serum albumin, pH 7.4), and incubating the cells at 37° C. for 3 hours, thereafter determining the absorbance at 450 nm using the plate reader EnVision (manufactured by Perkin-Elmer Company).

[0168] After the measurement, Triton X-100 was added to the medium to obtain a final concentration of 1%, and the same experiment was performed, whereby the total β-hexosaminidase activity contained in LAD2 was measured. The mean for the wells with no cells seeded thereto was calculated, and this was subtracted as the background from each measured value. The ratio of degranulation induced by the anti-IgE antibody was calculated as the ratio (%) of the 3-hexosaminidase activity to the total β-hexosaminidase activity released with 1% Triton X-100. The relative activity of degranulation was evaluated by the deviation from the median by a calculation of subtracting the median from the degranulation efficiency, and dividing the difference by the mean deviation. Degranulation promoting activity was expressed with plus symbols, and degranulation suppressing activity with minus symbols. Two independent experiments were performed; the results are shown in Table 8.

TABLE 8

relative activity
of degranulation

| introduced antisense | first time | second time |
|---|---|---|
| hsa-miR-194 | 3.69 | 2.67 |
| hsa-miR-500 | 4.42 | 2.36 |
| hsa-miR-365 | −2.35 | −2.16 |

[0169] Seven days after the introduction of the antisense oligonucleotide against the micro-RNA, human myeloma IgE (manufactured by Cosmo Bio Company) was added to obtain a final concentration of 0.3 μg/mL, and the cells were cultured overnight in an incubator at 37° C. and a 5% CO₂ concentration; the following day, a rabbit antihuman IgE antibody was added to induce degranulation, and the ratio of degranulation was measured. The results are shown in Table 9.

TABLE 9

relative activity
of degranulation

| introduced antisense | first time | second time |
|---|---|---|
| hsa-miR-194 | 2.63 | 2.05 |
| hsa-miR-500 | 3.75 | 2.82 |
| hsa-miR-365 | −0.94 | −0.77 |

[0170] As shown in Tables 8 and 9, it was found that the ratio of degranulation increased with the introduction of the antisense oligonucleotide against hsa-miR-194 or hsa-miR-500, and that conversely the ratio of degranulation decreased with the introduction of the antisense oligonucleotide against hsa-miR-365.

### Example 3

### Action of Forcible Expression of Micro-RNA Precursor on Degranulation in Mast Cells in Degranulation-Suppressed State

[0171] An siRNA of the Dicer1 gene (hereinafter, the Dicer1-siRNA) and a human micro-RNA precursor were co-transfected to LAD2, and the influence of the micro-RNA precursor on the degranulation stimulated by Compound 48/80 was examined.

[0172] LAD2 was seeded to a 96-well plate at 2×10⁴ cells per well, and the Dicer1-siRNA and the micro-RNA precursor were co-transfected using a lipofection method, specifically GeneSilencer (manufactured by Genlantis Company), to obtain a final concentration of 25 nM of each. The sequence of the siRNA against the human Dicer1 gene used was the Dicer1-siRNA that targets SEQ ID NO:4148 (manufactured by QIAGEN Company). The micro-RNA precursor used was a human micro-RNA library synthesized at Ambion Company. As negative controls for the siRNA and the micro-RNA precursor, All Stars Negative Control siRNA (hereinafter, siRNA allstars) (manufactured by QIAGEN Company) and Pre-miR™miRNA Precursor Negative Control #1 (hereinafter, miR-negacon#1) (manufactured by Ambion Company), respectively, were provided, and were introduced into LAD2 in the same manner. Lipofection was performed according to the method described in the instruction manual attached to the product.

[0173] Three days after the introduction of the micro-RNA precursor by the lipofection method, the culture medium was replaced with the Tyrode buffer solution (126.1 mmol/L NaCl, 4.0 mmol/L KCl, 1.0 mmol/L CaCl₂, 0.6 mmol/L MgCl₂, 0.6 mmol/L KH₂PO₄, 10 mM HEPES, 5.6 mmol/L D-glucose, 0.1% bovine serum albumin, pH 7.4), and the cells were suspended. Subsequently, equal volumes of the cell suspension were seeded to two different sites in a 96-well plate, and Compound 48/80 (manufactured by Sigma-Aldrich Company) at a final concentration of 1.0 μg/mL and Triton X-100 at a final concentration of 1%, respectively, were added. After incubation at 37° C. for 20 minutes to induce degranulation, centrifugation was performed, and the culture supernatant was recovered.

[0174] Degrees of degranulation were evaluated by measuring the β-hexosaminidase activity of the enzyme in the granules released into the culture supernatant. The β-hexosaminidase activity was evaluated by adding to the recovered culture supernatant 50 ml of 4 mmol/L 4-nitrophenyl-N-acetyl-β-D-glucosaminide (manufactured by Sigma-Aldrich Company) dissolved in 40 mmol/L citric acid buffer solution (pH 4.5), and incubating the supernatant at 37° C. for 1 hour, thereafter determining the absorbance of a sample supplemented with 100 mL of 0.2 mol/L glycine (pH 10.7) at 405 nm using the plate reader 1420 ARVOsx (manufactured by Perkin-Elmer Company).

[0175] The ratio of degranulation induced by Compound 48/80 was calculated as the ratio (%) to the β-hexosaminidase activity in the plot with the addition of 1% Triton X-100. The activity of the micro-RNA for cancelling the degranulation suppression due to introduction of the Dicer1-siRNA was calculated as a relative activity with the ratio of degranulation in the plot with co-transfection of the Dicer1-siRNA and miR-negacon#1 taken as 0%, and with the ratio of degranulation in the plot with co-transfection of the siRNA allstars and micro-RNA-negacon#1 taken as 100%. The results are shown in Table 10.

TABLE 10

relative activity
of degranulation

| introduced micro-RNA | first time | second time |
|---|---|---|
| hsa-miR-29b | 153.1 | 115.1 |
| hsa-miR-589 | 152.2 | ND |
| hsa-miR-299-3p | 131.2 | 94.1 |
| hsa-miR-29a | 120.6 | 88.1 |
| hsa-miR-30b | 118.2 | 58.3 |
| hsa-miR-506 | 117.3 | 97.2 |
| hsa-miR-105 | 117.3 | 110.1 |
| hsa-miR-127 | 113.8 | 167.3 |
| hsa-miR-769-5p | 104.7 | ND |
| hsa-miR-597 | 104.4 | ND |
| hsa-miR-504 | 102.1 | 63.9 |
| hsa-miR-770-5p | 101.4 | ND |
| hsa-miR-150 | 101.2 | 90.4 |
| hsa-miR-605 | 101.0 | ND |
| hsa-miR-640 | 100.0 | ND |
| hsa-miR-154 | 99.7 | 151.0 |
| hsa-miR-380-5p | 97.7 | 13.6 |
| hsa-miR-629 | 92.6 | ND |
| hsa-miR-660 | 92.4 | ND |
| hsa-miR-128b | 90.0 | 112.9 |
| hsa-miR-518c | 90.0 | −40.0 |
| hsa-miR-767-5p | 88.5 | ND |
| hsa-miR-423 | 87.1 | 11.1 |
| hsa-miR-567 | 87.1 | ND |
| hsa-miR-30a-5p | 86.2 | 60.9 |
| hsa-miR-383 | 84.2 | −16.9 |
| hsa-miR-497 | 82.8 | 33.3 |
| hsa-miR-124a | 82.3 | 83.4 |
| hsa-miR-512-3p | 81.8 | 117.5 |
| hsa-miR-133a | 81.0 | 63.5 |
| hsa-miR-501 | 75.9 | 65.6 |
| hsa-miR-133b | 74.1 | 103.8 |
| hsa-miR-514 | 69.7 | 50.5 |
| hsa-miR-619 | 64.8 | 151.1 |
| hsa-miR-527 | 62.9 | 55.0 |
| hsa-miR-454-3p | 61.3 | 54.9 |
| hsa-miR-148a | 60.5 | 82.0 |
| hsa-miR-411 | 58.4 | 71.9 |
| hsa-miR-128a | 58.4 | 96.1 |
| hsa-miR-511 | 58.1 | 71.2 |
| hsa-miR-508 | 55.3 | 91.1 |
| hsa-miR-562 | 53.8 | 81.3 |
| hsa-miR-802 | 52.2 | 58.2 |
| hsa-miR-146a | 52.1 | 56.1 |
| hsa-miR-373* | 31.5 | 82.1 |
| hsa-miR-433 | 22.6 | 84.7 |
| hsa-miR-507 | −6.2 | 107.4 |

### Example 4

### mRNA Expression Analysis of LAD2 Forcibly Overexpressing miR-142-3p Precursor and miR-24 Precursor

[0176] Each of the miR-142-3p and miR-24 precursors of human micro-RNA was introduced into LAD2, and gene clusters the amounts of whose expression fluctuate due to introduction of each of the micro-RNA precursors were comprehensively searched for using an mRNA array.

[0177] LAD2 was seeded to a 6-well plate at 5×10⁵ cells per well, and each micro-RNA precursor was introduced using a lipofection method, specifically GeneSilencer (manufactured by Genlantis Company), to obtain a final concentration of 30 nM. The micro-RNA precursors used were Pre-miR™ miRNA Precursor Molecules synthesized at Ambion Company. For negative control, Pre-miR™miRNA Precursor Negative Control#2 manufactured by Ambion Company (hereinafter, miR-negacon#2) was used. Lipofection was performed according to the method described in the instruction manual attached to the product.

[0178] Two days after the introduction of each of the micro-RNA precursors by the lipofection method, the cells were recovered, and total RNA was purified from the cells using miRNeasy (manufactured by QIAGEN Company).

[0179] The purified total RNA was analyzed for mRNA expression using the Whole Human Genome Oligo Microarray manufactured by Agilent Technologies Company. The analytical procedure was in accordance with the protocol of Agilent Technologies Company. Specifically, a cRNA obtained by labeling the total RNA with Cy3 was hybridized to the microarray at 65° C. for about 17 hours, and the microarray was washed, after which the microarray was scanned at a resolution of 5 μm using the Agilent technologies Microarray Scanner to acquire signal values.

[0180] To examine the gene clusters exhibiting an expressional fluctuation in the plots with the introduction of the miR-142-3p or miR-24 precursor, respectively, the relative activity of the amount expressed was calculated with the signal value for each gene detected in the plot with the introduction of miR-negacon#2 taken as 1.0. In the plots with the introduction of the miR-142-3p precursor or the miR-24 precursor, gene clusters whose expression was suppressed to the extent of a relative activity of 0.8 or less are shown in Table 11 and Table 12-1 to Table 12-3, respectively.

TABLE 11

| | |
|---|---|
| hsa-miR-142-3p | TSHR(7253); TWSG1(57045); MXRA7(439921); PTGIS(5740); ANKRD11(29123); |
| | ARID5B(84159); BACH1(571); ATF7IP(55729); ITGAV(3685); LASS6(253782); |
| | ALOX15(246); PROM1(8842); P15RS(55197); FAM102B(284611); CHM(1121); CCDC6(8030); |
| | BNC2(54796); ARL1(400); STRN3(29966); DYNC1LI2(1783); C9orf72(203228); KRT10(3858); |
| | SLC35F5(80255); PSIP1(11168); MTCH1(23787); RHOBTB3(22836); DIRC2(84925); |
| | CA5B(11238); EGR2(1959); TCEB3(6924); MON2(23041); ARL8B(55207); HGS(9146); |
| | MTHFR(4524); TMEM34(55751); SLC37A3(84255); ARHGEF12(23365); C22orf15(150248); |
| | RNF7(9616); PREI3(25843); SIRT3(23410); STAU1(6780); ARF4(378); CCNJ(54619); |
| | PCTP(58488); HIP1(3092); C1orf54(28970); MMAB(326625); RHEB(6009); PPP1R2(5504); |
| | SPRED1(161742); RPS6KA3(6197); QKI(9444); SKP1A(6500); SECISBP2(79048); SOCS6(9306); |
| | KIAA1715(80856); HECTD1(25831); KIAA1191(57179); SLC25A22(79751); DNAJB4(11080); |
| | BBS1L(10767); RAC1(5879); FBXO21(23014); CFL2(1073); PLEKHA3(65977); PCGF3(10336); |
| | C10orf118(55088); APC(324); GNAQ(2776); BTBD7(55727); USH1C(10083); GTF2A1(2957); |
| | CASP8(841); C6orf152(167691); FHIT(2272); SLC30A6(55676); PCMTD2(55251); |
| | SPATA18(132671); TCF7(6932); C10orf119(79892); SPATA6(54558); LGR4(55366); |
| | FNBP1L(54874); CRTAM(56253); C14orf24(283635); ZNF558(148156); ME1(4199); |
| | TBL1X(6907); BRWD1(54014); FNDC3A(22862); DPYSL2(1808); KIAA0367(23273); PIGA(5277); |
| | MKLN1(4289); SLC13A3(64849); MAP3K7IP2(23118); SETBP1(26040); ZNF395(55893); |
| | SLCO4C1(353189); FAM44B(91272); GABRG2(2566); CLUAP1(23059); GPRC5A(9052); |
| | GRHL1(29841); PSMB5(5693); PCSK1(5122); ZCCHC14(23174); DRFZP686I15217(401232); |
| | NSFL1C(55968); ST6GAL2(84620); TMTC1(83857); ADAMTS3(9508); UTX(7403); NAGS(162417); |
| | ZBT41(360023); BNRPDL(9987); DIP2A(23181); CTTN(2017); CDADC1(81602); ATP6V1A(523); |
| | RAPH1(65059); PCAF(8850); COPS7A(50813); SERP1(27230); ATG5(9474); TBC1D8(11138); |
| | TSPYL1(7259); NUDT11(55190); C8orf77(286103); RAB39(54734); SLC7A11(23657); |
| | SYPL1(6856); ZNF547(284306); RBM16(22828); CDK5R1(8851); EML4(27436); SPRY3(10251); |
| | NUCKS1(64710); VAMP3(9341); OSBPL8(114882); FOXD4(2298); ATP2A2(488); RNF141(50862); |
| | NHLRC2(374354); C16orf28(65259); ZNF367(195828); KDELR2(11014); CDC34(997); |
| | C9orf5(28731); CUL5(8065); ATP1B1(481); SSX2IP(117178); EPM2AIP1(9852); RRM2B(50484); |
| | CALCOCO2(10241); HMGB1(3146); TSEN34(79042); CREB5(9586); TUBB2A(7280); |
| | EEF2K(29904); DMXL2(23312); DCUN1D4(23142); RAB11FIP2(22841); AMZ2(51321); |
| | KLHDC6(166348); CLIC4(25932); MAP4K3(8491); EVA1(10205); ARL2(402); C1orf9(51430); |
| | CTNND1(1500); PFKM(5213); TGFBR1(7046); DEPDC1(55635); TARDBP(23435); SCAMP1(9522); |
| | CD84(8832); C4orf15(79441); PTPN23(25930); ADCY9(115); SGEF(26084); B3GNT1(11041); |
| | FKBP1A(2280); C17orf63(55731); SPIN1(10927); USP9X(8239); BDH2(56898); BCLAF1(9774); |
| | AKT1S1(84335); LRRC32(2615); RAB40B(10966); FZD7(8324); CRK(1398); C1orf107(27042); |
| | MRPL30(51263); TTBK2(146057); IL7R(3575); RBM47(54502); STAM2(10254); RUNDC1(146923); |
| | LYCAT(253558); CCNT2(905); MYRIP(25924); FAM19A2(338811); RLF(6018); ZNF641(121274); |
| | CDCP1(64866); MTMR9(66036); SLC30A9(10463); SSPN(8082); OXR1(55074); |

TABLE 12-1

| | |
|---|---|
| hsa-miR-24 | CENTB5(116983); ATAD3B(83858); PLCL4(9651); KLHL21(9903); H6PD(9563); SPSB1(80176); |
| | CTNNBIP1(56998); CLCN6(1185); ATP13A2(23400); KIAA0090(23065); SEPN1(57190); |
| | PAQR7(164091); ZDHHC18(84243); XKR8(55113); SDC3(9672); SERINC2(347735); |
| | C1orf91(56063); BSDC1(55108); RBBP4(5928); HPCA(3208); TRIM62(55223); SNIP1(79753); |
| | YRDC(79693); MTF1(4520); INPP5B(3633); MFSD2(84879); CITED4(163732); MED8(112950); |
| | PTPRF(5792); MAST2(23139); ATPAF(64756); KIAA0494(9813); RNF11(26994); |
| | PCSK9(255738); LEPROT(54741); HHLA3(11147); SEP15(9403); HIPK1(204851); SYT6(148281); |
| | DENND2C(163259); GPR89A(51463); CGN(57530); RORC(6097); SPRR1A(6698); SLC39A1(27173); |
| | DCST2(127579); SEMA4A(64218); UHMK1(127933); SLC19A2(10560); FAM20B(9917); STX6(10228); |
| | C1orf21(81563); RNF2(6045); DKFZp434B1231(91156); SYT2(127833); PRELP(5549); |
| | CNTN2(6900); TMCC2(9911); MAPKAPK2(9261); C1orf107(27042); DTL(51514); ANGEL2(90806); |
| | C1orf115(79762); ENAH(55740); COG2(22796); C1orf198(84886); MTHFR(4524); KIF21B(23046); |
| | FLJ13305(84140); RNASEH1(246243); HPCAL1(3241); SLC5A6(8884); UCN(7349); PPM1G(5496); |
| | KIAA1414(54497); SFXN5(94097); REEP1(65055); CHST10(9486); GPR45(11250); MGC10993(80775); |
| | WDR33(55339); LOC130074(130074); GPR155(151556); KIAA1715(80856); ALS2CR2(55437); |
| | ALS2(57679); TNS1(7145); IL8RA(3577); MGC42174(129563); PER2(8864); ANKMY1(51281); |
| | RNPEPL1(57140); BOK(666); ING5(84289); KLHL23(151230); MGC40579(256356); C3orf29(64419); |
| | TTLL3(26140); IQSEC1(9922); NUP210(23225); SGOL1(151648); CMTM6(54918); CCR2(1231); |
| | KIF9(64147); CDC25A(993); TCTA(6988); BSN(8927); CISH(1154); NEK4(6787); IL17RB(55540); |
| | MAGI1(9223); CCDC52(152185); KIAA2018(205717); KIAA1407(57577); QTRTD1(79691); |
| | NR1I2(8856); CD86(942); CCDC58(131076); SLC41A3(54946); TSC22D2(9819); DVL3(1857); |
| | MASP1(5648); DGKQ(1609); SLC26A1(10861); SPON2(10417); WHSC1(7468); WFS1(7466); |
| | PPP2R2C(5522); HTRA3(94031); FLJ20280(54876); PDGFRA(5156); FRAS1(80144); PAQR3(152559); |
| | LRAT(9227); KENAE(202243); LOC134145(134145); FAM105B(90268); MTMR12(54545); NLN(57486); |
| | F2RL2(2151); MGC33214(153396); TCF7(6932); PHF15(23338); DDX46(9879); C5orf20(140947); |
| | PCDHGB4(8641); DIAPH1(1729); PCDH1(5097) ;CDX1(1044); SLC6A7(6534); NDST1(3340); |
| | GALNT10(55568); ADAM19(8728); SH3PXD2B(285590); BNIP1(662); TSPAN17(26262); PDLIM7(9260); |
| | ADAMTS2(9509); CNOT6(57472); C6orf149(57128); SSR1(6745); ELOVL2(54898); ALDH5A1(7915); |
| | TNF(7124); LY6G6C(80740); AGPAT1(10554); TAPBP(6892); PACSIN1(29993); MAPK13(5603); |
| | PIM1(5292); FOXP4(116113); KLHDC3(116138); SRF(6722); TRAM2(9697); FBXO9(26268); |
| | SESN1(27244); MAP7(9053); GPR126(57211); TRIM50C(378108); FLJ20397(54919); IQCE(23288); |
| | TTYH3(80727); GNA12(2768); FOXK1(221937); Ells1(222166); KIAA0241(23080); EPDR1(54749); |
| | STARD3NL(83930); UBE2D4(51619); OGDH(4967); LIMK1(3984); TRIM50B(375593); FGL2(10875); |
| | SRI(6717); ASB4(51666); CPSF4(10898); GATS(352954); PERQ1(64599); RABL5(64792); |
| | EMID2(136227); TSPAN33(340348); FLJ14803(84928); EXOC4(60412); ATP6V0E2L(155066); |
| | MTMR9(66036); HR(55806); C8orf58(541565); BIN3(55909); NEP3(4741); BNIP3L(665); |
| | ZNF395(55893); RC74(55756); IKBKB(3551); BHLHB5(27319); ZNF704(619279); TP53INP1(94241); |
| | PABPC1(26986); BAALC(79870); PHF20L1(51105); ZFP41(286128); RHPN1(114822); PYCRL(65263); |
| | GRINA(2907); GPR172A(79581); KIAA1688(80728); C9orf93(203238); CNTFR(1271); GBA2(57704); |
| | GNE(10020); TRPM6(140803); SPIN(10927); EDG3(1903); PTPDC1(138639); FANCC(2176); |
| | C9orf37(158427); ZNF483(158399); ZFP37(7539); AKNA(80709); DFNB31(25861); TRAF1(7185); |
| | NEK6(10783); NR5A1(2516); C9orf28(89853); TOR2A(27433); C9orf90(203245); C9orf74(81605); |
| | ZYG11BL(10444); CRAT(1384); SETX(23064); SURF5(6837); LCN12(286256); SECISBP2(79048); |
| | WDR37(22884); IL15RA(3601); IL2RA(3559); C10orf3 |

TABLE 12-2
0(222389); PIP5K2A(5305); NRP1(8829);
ZNF248(57209); CCDC6(8030); ARID5B(84159);
DNAJB12(54788); USP54(159195); KCNMA1(3778);
POLR3A(11128); C10orf56(219654); TSPAN14(81619);
C10orf13(143282); RP11-529I10.4(25911);
FAM45B(55855); FGFR2(2263); ADAM8(101);
AP2A2(161); TUB(7275); NAV2(89797);
LDLRAD3(143458); TTC17(55761); HSD17B12(51144);
MAPK8IP1(9479); KIAA0652(9776); LRP4(4038);
FLJ20487(54949); TTC9C(283237); MEN1(4221);
KIAA0404(23130); CDC42EP2(10435);
LOC283130(283130); KLC2(64837); ALDH3B2(222);
IGHMBP2(3508); ARHGEF17(9828); PPME1(51400);
SERPINH1(871); WNT11(7481); LRRC32(2615);
PHCA(55331); LOC283219(283219); FUT4(2526);
SLC35F2(54733); PCSK7(9159); BLR1(643);
TRAPPC4(51399); H2AFX(3014); BTBD15(29068);
ADAMTS15(170689); NRIP2(83714); VWF(7450);
PLEKHG6(55200); TNFRSF1A(7132); SPSB2(84727);
ENO2(2026); PHC1(1911); M6PR(4074);
CDKN1B(1027); DDX11(1663); SLC2A13(114134);
NELL2(4753); LMBR1L(55716); AQP2(359);
GPD1(2819); SLC11A2(4891); POU6F1(5463);
LOC57228(57228); PRR13(54458); MBD6(114786);
DKFZP586D0919(25895); MON2(23041);
DYRK2(8445); IFNG(3458); SLC35E3(55508);
MMAB(326625); PXN(5829); KIAA0152(9761);
TCF1(6927); C12orf43(64897); BCL7A(605);
HIP1R(9026); ABCB9(23457); SETD8(387893);
SCARB1(949); AACS(65985); TMTC1(83857);
ATP8A2(51761); SLC7A1(6541); PCDH17(27253);
HS6ST3(266722); TMTC4(84899); F7(2155);
GAS6(2621); BCL2L2(599); KIAA0323(23351);
C14orf108(55745); SPTB(6710); PNTB(2342);
DPF3(8110); ABCD4(5826); NEK9(91754);
ANGEL1(23357); POMT2(29954); TSHR(7253);
GPR68(8111); CCNK(8812); WDR25(79446);
WDR20(91833); C14orf2(9556);
KIAA0284(283638); GPR132(29933);
PACS2(23241); KIAA0317(9870); HERC2(8924);
C15orf45(641318); AQR(9716); BMF(90427);
CCDC32(90416); MAPKBP1(23006); TPM1(7168);
RASL12(51285); BRUNOL6(60677); ADPGK(83440);
LSM16(80153); CSK(1445); CPLX3(594855);
MPI(4351); C15orf9(56905); NEIL1(79661);
C15orf27(123591); RCN2(5955); ARNT2(9915);
ADAMTSL3(57188); SCAND2(54581); WDR73(84942);
ABHD2(11057); C15orf42(90381); FURIN(5045);
HDDC3(374659); DKFZp434I1020(196968);
MT1E(4493); C16orf9(83986); RGS11(8786);
SOLH(6650); KIAA1924(197335); CHTF18(63922);
CACNA1H(8912); TRAF7(84231); PRSS33(260429);
PRSS21(10942); DNASE1(1773); PMM2(5373);
MYH11(4629); GGA2(23062); SBK1(388228);
SPN(6693); RNF40(9810); MT1M(4499);
CMTM3(123920); CMTM4(146223); RANBP10(57610);
C16orf56(80152);PSKH1(5681); HAS3(3038);
CHST4(10164); CHST6(4166); WWOX(51741);
KIAA0513(9764); FAM38A(9780); ANKRD11(29123);
SNN(8303); KATNB1(10300); TUSC5(286753);
CTNS(1497); ATP2A3(489); DHX33(56919);
MPDU1(9526); ATP1B2(482); MAPK7(5598);
KSR1(8844); SLC13A2(9058); SEZ6(124925);
GIT1(28964); DKFZp667M2411(147172);
ACACA(31); SOCS7(30837); CACNB1(782);
STAT5B(6777); MLX(6945); AOC3(8639);
BRCA1(672); SLC4A1(6521); GFAP(2670);
PLEKHM1(9842); MAPT(4137); ITGB3(3690);
PNPO(55163); DLX3(1747); CROP(51747);
BZRAP1(9256); PPM1D(8493); LIMD2(80774);
PRKCA(5578); FADS6(283985); KCTD2(23510);
KIAA0195(9772); CASKIN2(57513) ;RECQL5(9400);
MXRA7(439921); NPTX1(4884); BAIAP2(10458);
DUS1L(64118); ITGA2B(3674); PRR11(55771);
HOXB7(3217); L3MBTL4(91133); CEP192(55125);
RNF138(51444); PSTPIP2(9050); SERPINB8(5271);
PRG2(79948); CNN2(1265); MIDN(90007);TCF3(6929);
DOT1L(84444); SLC39A3(29985); NCLN(56926);
SH3GL1(6455); M6PRBP1(10226); RANBP3(8498);
CD209(30835); MAP2K7(5609); FBXL12(54850);
RAB3D(9545); LPPR2(64748); BRD4(23476);
ELL(8178); ZNF93(81931); UPK1A(11045);
PAK4(10298); SAMD4B(55095); IXL(55588);
ITPKC(80271); CEACAM4(1089); CEACAM3(1084);
APOE(348); DHX34(9704); FLJ32926(93233);
RCN3(57333); BCL2L12(83596); KLK2(3817);
OSCAR(126014); LILRB4(11006); SUV420H2(84787);
ZNF471(57573); ZNF71(58491);FLJ38288(284309);

TABLE 12-3
ZNF587(84914); MGC2752(65996); RAB4B(53916);
PTPNS1(140885); UBOX5(22888); ADAM33(80332);
C20orf29(55317); C20orf42(55612); ENTPD6(955);
PLAGL2(5326); POFUT1(23509); KIF3B(9371);
TRPC4AP(26133); C20orf117(140710);
MANBAL(63905); L3MBTL(26013); RIMS4(140730);
TOMM34(10953); ELMO2(63916); PRKCBP1(23613);
SLC9A8(23315); STX16(8675); DIDO1(11083);
COL20A1(57642); STMN3(50861); TNFRSF6B(8771);
AGPAT3(56894); RBM11(54033); DSCR3(10311);
KIAA0179(23076); PDXK(8566); POFUT2(23275);
TMEM50B(757); CLTCL1(8218); FLJ42953(400892);
PPIL2(23759); PPM1F(9647); RAB36(9609);
SUSD2(56241); C22orf13(83606);
FLJ33814(150275); NF2(4771); CABP7(164633);
RP5-1119A7.4(80020); KIAA1904(114794);
DNAL4(10126); SYNGR1(9145); TEF(7008);
FLJ22349(79879); FAM109B(150368);
TRIOBP(11078); PCTK1(5127); PIM2(11040);
SYP(6855); ZXDA(7789); RP11-93B10.1(139886):
EDA(1896); MLLT7(4303); COL4A6(1288);
AMMECR1(9949); XPNPEP2(7512); RAP2C(57826);
GPC4(2239); CD99L2(83692); GDI1(2664);
SCML1(6322);

### INDUSTRIAL APPLICABILITY

[0181] According to the present invention, a mast cell degranulation control agent, a diagnostic agent or therapeutic agent for a disease resulting from mast cell degranulation control, a method of controlling mast cell degranulation, and a screening method for a mast cell degranulation control agent can be provided. These are useful in the diagnosis or treatment of a disease resulting from mast cell degranulation control.

### [Free Text of Sequence Listing]

[0182] SEQ ID NO:3916—n represents a, c, g or u
SEQ ID NO:4148—explanation of artificial sequences: synthetic DNAs

The application's sequence listing, which the Patent Office published only in electronic form, follows.

SEQUENCE LISTING (4148 sequences)

SEQ ID NO: 1 - RNA, 22 nt, Homo sapiens
uagcagcacguaaauauuggcg

SEQ ID NO: 2 - RNA, 21 nt, Homo sapiens
uagcagcacagaaauauuggc

SEQ ID NO: 3 - RNA, 20 nt, Homo sapiens
acugcagugaaggcacuugu

SEQ ID NO: 4 - RNA, 22 nt, Homo sapiens
uaaggugcaucuagugcagaua

SEQ ID NO: 5 - RNA, 22 nt, Homo sapiens
uaaggugcaucuagugcaguua

SEQ ID NO: 6 - RNA, 23 nt, Homo sapiens
caaagugcucauagugcagguag

SEQ ID NO: 7 - RNA, 22 nt, Homo sapiens
uagcuuaucagacugauguuga

SEQ ID NO: 8 - RNA, 22 nt, Homo sapiens
uggcucaguucagcaggaacag

SEQ ID NO: 9 - RNA, 22 nt, Homo sapiens
cauugcacuugucucggucuga

SEQ ID NO: 10 - RNA, 21 nt, Homo sapiens
uauugcacauuacuaaguugc

SEQ ID NO: 11 - RNA, 22 nt, Homo sapiens
uucaaguaauucaggauagguu

SEQ ID NO: 12 - RNA, 22 nt, Homo sapiens
cuuucagucggauguuugcagc

SEQ ID NO: 13 - RNA, 23 nt, Homo sapiens
uggcagugucuuagcugguuguu

SEQ ID NO: 14 - RNA, 22 nt, Homo sapiens
uggcaguguauuguuagcuggu

SEQ ID NO: 15 - RNA, 22 nt, Homo sapiens
aggcaguguauuguuagcuggc

SEQ ID NO: 16 - RNA, 23 nt, Homo sapiens
agcagcauuguacagggcuauca

SEQ ID NO: 17 - RNA, 21 nt, Homo sapiens
agugguuuuacccuaugguag

SEQ ID NO: 18 - RNA, 22 nt, Homo sapiens
ucagugcaucacagaacuuugu

SEQ ID NO: 19 - RNA, 22 nt, Homo sapiens
ugauauguuugauauauuaggu

SEQ ID NO: 20 - RNA, 23 nt, Homo sapiens
cccaguguucagacuaccuguuc

SEQ ID NO: 21 - RNA, 23 nt, Homo sapiens
cccaguguuuagacuaucuguuc

SEQ ID NO: 22 - RNA, 22 nt, Homo sapiens
uuuccuaugcauauacuucuuu

SEQ ID NO: 23 - RNA, 22 nt, Homo sapiens
auaagacgagcaaaaagcuugu

SEQ ID NO: 24 - RNA, 22 nt, Homo sapiens
cugugcgugugacagcggcuga

SEQ ID NO: 25 - RNA, 22 nt, Homo sapiens
uucccuuugucauccuucgccu

SEQ ID NO: 26 - RNA, 21 nt, Homo sapiens
acagcaggcacagacaggcag

SEQ ID NO: 27 - RNA, 21 nt, Homo sapiens
uugugcuugaucuaaccaugu

SEQ ID NO: 28 - RNA, 22 nt, Homo sapiens
ugguuuaccgucccacauacau

SEQ ID NO: 29 - RNA, 23 nt, Homo sapiens
ccuaguagguguccaguaagugu

SEQ ID NO: 30 - RNA, 22 nt, Homo sapiens
cuggcccucucugcccuuccgu

SEQ ID NO: 31 - RNA, 22 nt, Homo sapiens
aacacaccugguuaaccucuuu

SEQ ID NO: 32 - RNA, 23 nt, Homo sapiens
uccagcaucagugauuuuguuga

SEQ ID NO: 33 - RNA, 21 nt, Homo sapiens
ugcugacuccuaguccagggc

SEQ ID NO: 34 - RNA, 23 nt, Homo sapiens
aaugacacgaucacucccguuga

SEQ ID NO: 35 - RNA, 22 nt, Homo sapiens
ucaggcucaguccccucccgau

SEQ ID NO: 36 - RNA, 22 nt, Homo sapiens
agaggcuggccgugaugaauuc

SEQ ID NO: 37 - RNA, 22 nt, Homo sapiens
uccuguacugagcugccccgag

SEQ ID NO: 38 - RNA, 21 nt, Homo sapiens
cccagauaauggcacucucaa

SEQ ID NO: 39 - RNA, 23 nt, Homo sapiens
uacucaggagaguggcaaucaca

SEQ ID NO: 40 - RNA, 21 nt, Homo sapiens
gagugccuucuuuuggagcgu

SEQ ID NO: 41 - RNA, 24 nt, Homo sapiens
uucuccaaaagaaagcacuuucug

SEQ ID NO: 42 - RNA, 22 nt, Homo sapiens
ccucuagauggaagcacugucu

SEQ ID NO: 43 - RNA, 23 nt, Homo sapiens
aaagugcuucucuuugguggguu

SEQ ID NO: 44 - RNA, 22 nt, Homo sapiens
aagugcuuccuuuuagaggguu

SEQ ID NO: 45 - RNA, 22 nt, Homo sapiens
acaaagugcuucccuuuagagu

SEQ ID NO: 46 - RNA, 23 nt, Homo sapiens
aaaaugguucccuuuagaguguu

SEQ ID NO: 47 - RNA, 21 nt, Homo sapiens
gaaggcgcuucccuuuagagc

SEQ ID NO: 48 - RNA, 24 nt, Homo sapiens
cugaagugauguguaacugaucag

SEQ ID NO: 49 - RNA, 21 nt, Homo sapiens
uuuccauaggugaugagucac

SEQ ID NO: 50 - RNA, 25 nt, Homo sapiens
aggcaccagccaggcauugcucagc

SEQ ID NO: 51 - RNA, 21 nt, Homo sapiens
gaagugugccguggugugucu

SEQ ID NO: 52 - RNA, 19 nt, Homo sapiens
aggcugcggaauucaggac

SEQ ID NO: 53 - RNA, 25 nt, Homo sapiens
gcugggcagggcuucugagcuccuu

SEQ ID NO: 54 - RNA, 22 nt, Homo sapiens
agggggaaaguucuauaguccu

SEQ ID NO: 55 - RNA, 22 nt, Homo sapiens
aaccagcaccccaacuuuggac

SEQ ID NO: 56 - RNA, 23 nt, Homo sapiens
acuugggcacugaaacaaugucc

SEQ ID NO: 57 - RNA, 24 nt, Homo sapiens
acugggggcuuucgggcucugcgu

SEQ ID NO: 58 - RNA, 21 nt, Homo sapiens
guggcugcacucacuuccuuc

SEQ ID NO: 59 - RNA, 21 nt, Homo sapiens
aggaggcagcgcucucaggac

SEQ ID NO: 60 - RNA, 22 nt, Homo sapiens
uggugggccgcagaacaugugc

SEQ ID NO: 61 - RNA, 25 nt, Homo sapiens
ggcggagggaaguagguccguuggu

SEQ ID NO: 62 - RNA, 22 nt, Homo sapiens
uacccauugcauaucggaguug

SEQ ID NO: 63 - RNA, 23 nt, Homo sapiens
ugucacucggcucggcccacuac

SEQ ID NO: 64 - RNA, 23 nt, Homo sapiens
uggugcggagagggcccacagug

SEQ ID NO: 65 - RNA, 21 nt, Homo sapiens
uggaggagaaggaaggugaug

SEQ ID NO: 66 - RNA, 22 nt, Homo sapiens
acuccagccccacagccucagc

SEQ ID NO: 67 - RNA, 22 nt, Homo sapiens
uguaacagcaacuccaugugga

SEQ ID NO: 68 - RNA, 22 nt, Homo sapiens
augcaccugggcaaggauucug

SEQ ID NO: 69 - RNA, 22 nt, Homo sapiens
uucaccaccuucuccacccagc

SEQ ID NO: 70 - RNA, 23 nt, Homo sapiens
agcuacauugucugcuggguuuc

SEQ ID NO: 71 - RNA, 21 nt, Homo sapiens
ugagguaggagguuguauagu

SEQ ID NO: 72 - RNA, 21 nt, Homo sapiens
uggaauguaaagaaguaugua

SEQ ID NO: 73 - RNA, 22 nt, Homo sapiens
uggaauguaaggaagugugugg

SEQ ID NO: 74 - RNA, 20 nt, Homo sapiens
aggaauguuccuucuuugcc

SEQ ID NO: 75 - RNA, 23 nt, Homo sapiens
ucuuugguuaucuagcuguauga

SEQ ID NO: 76 - RNA, 21 nt, Homo sapiens
aucacauugccagggauuacc

SEQ ID NO: 77 - RNA, 21 nt, Homo sapiens
uucacaguggcuaaguucugc

SEQ ID NO: 78 - RNA, 22 nt, Homo sapiens
aaggagcucacagucuauugag

SEQ ID NO: 79 - RNA, 21 nt, Homo sapiens
ggcaagaugcuggcauagcug

SEQ ID NO: 80 - RNA, 21 nt, Homo sapiens
gugcauugcuguugcauugca

SEQ ID NO: 81 - RNA, 22 nt, Homo sapiens
uuuggcacuagcacauuuuugc

SEQ ID NO: 82 - RNA, 22 nt, Homo sapiens
aacccguagauccgaacuugug

SEQ ID NO: 83 - RNA, 24 nt, Homo sapiens
aaaagugcuuacagugcagguagc

SEQ ID NO: 84 - RNA, 21 nt, Homo sapiens
cauuauuacuuuugguacgcg

SEQ ID NO: 85 - RNA, 22 nt, Homo sapiens
ucggauccgucugagcuuggcu

SEQ ID NO: 86 - RNA, 22 nt, Homo sapiens
ucacagugaaccggucucuuuc

SEQ ID NO: 87 - RNA, 21 nt, Homo sapiens
cuuuuugcggucugggcuugc

SEQ ID NO: 88 - RNA, 22 nt, Homo sapiens
uugguccccuucaaccagcugu

SEQ ID NO: 89 - RNA, 21 nt, Homo sapiens
uugguccccuucaaccagcua

SEQ ID NO: 90 - RNA, 22 nt, Homo sapiens
uauggcuuuucauuccuaugug

SEQ ID NO: 91 - RNA, 23 nt, Homo sapiens
acuccauuuguuuugaugaugga

SEQ ID NO: 92 - RNA, 20 nt, Homo sapiens
cauaaaguagaaagcacuac

SEQ ID NO: 93 - RNA, 22 nt, Homo sapiens
ugagaacugaauuccauggguu

SEQ ID NO: 94 - RNA, 22 nt, Homo sapiens
ugagaacugaauuccauaggcu

SEQ ID NO: 95 - RNA, 23 nt, Homo sapiens
aacauucaacgcugucggugagu

SEQ ID NO: 96 - RNA, 21 nt, Homo sapiens
ugguucuagacuugccaacua

SEQ ID NO: 97 - RNA, 23 nt, Homo sapiens
uauggcacugguagaauucacug

SEQ ID NO: 98 - RNA, 21 nt, Homo sapiens
ucgugucuuguguugcagccg

SEQ ID NO: 99 - RNA, 21 nt, Homo sapiens
cugaccuaugaauugacagcc

SEQ ID NO: 100 - RNA, 21 nt, Homo sapiens
augaccuaugaauugacagac

SEQ ID NO: 101 - RNA, 22 nt, Homo sapiens
caucuuaccggacagugcugga

SEQ ID NO: 102 - RNA, 21 nt, Homo sapiens
uaaucucagcuggcaacugug

SEQ ID NO: 103 - RNA, 24 nt, Homo sapiens
uacugcaucaggaacugauuggau

SEQ ID NO: 104 - RNA, 21 nt, Homo sapiens
ccacaccguaucugacacuuu

SEQ ID NO: 105 - RNA, 24 nt, Homo sapiens
agcuacaucuggcuacugggucuc

SEQ ID NO: 106 - RNA, 21 nt, Homo sapiens
ugucaguuugucaaauacccc

SEQ ID NO: 107 - RNA, 23 nt, Homo sapiens
caagucacuagugguuccguuua

SEQ ID NO: 108 - RNA, 21 nt, Homo sapiens
agggcccccccucaauccugu

SEQ ID NO: 109 - RNA, 23 nt, Homo sapiens
acuuuaacauggaagugcuuucu

SEQ ID NO: 110 - RNA, 22 nt, Homo sapiens
uuuaacauggggguaccugcug

SEQ ID NO: 111 - RNA, 24 nt, Homo sapiens
aauccuuggaaccuaggugugagu

SEQ ID NO: 112 - RNA, 22 nt, Homo sapiens
acucaaaaugggggcgcuuucc

SEQ ID NO: 113 - RNA, 22 nt, Homo sapiens
uuauaauacaaccugauaagug

SEQ ID NO: 114 - RNA, 21 nt, Homo sapiens
aucauagaggaaaauccacgu

SEQ ID NO: 115 - RNA, 22 nt, Homo sapiens
cuccugacuccagguccugugu

SEQ ID NO: 116 - RNA, 23 nt, Homo sapiens
cgaauguugcucggugaaccccu

SEQ ID NO: 117 - RNA, 22 nt, Homo sapiens
agguuacccgagcaacuuugca

SEQ ID NO: 118 - RNA, 22 nt, Homo sapiens
uaauacugucugguaaaaccgu

SEQ ID NO: 119 - RNA, 22 nt, Homo sapiens
uaauacugccggguaaugaugg

SEQ ID NO: 120 - RNA, 21 nt, Homo sapiens
cuggauggcuccuccaugucu

SEQ ID NO: 121 - RNA, 22 nt, Homo sapiens
uugcauauguaggaugucccau

SEQ ID NO: 122 - RNA, 22 nt, Homo sapiens
uuuuugcgauguguuccuaaua

SEQ ID NO: 123 - RNA, 23 nt, Homo sapiens
aaaccguuaccauuacugaguuu

SEQ ID NO: 124 - RNA, 22 nt, Homo sapiens
uguuugcagaggaaacugagac

SEQ ID NO: 125 - RNA, 22 nt, Homo sapiens
aaucguacagggucauccacuu

SEQ ID NO: 126 - RNA, 23 nt, Homo sapiens
agugacaucacauauacggcagc

SEQ ID NO: 127 - RNA, 20 nt, Homo sapiens
auugacacuucugugaguag

SEQ ID NO: 128 - RNA, 22 nt, Homo sapiens
aucgugcauccuuuuagagugu

SEQ ID NO: 129 - RNA, 22 nt, Homo sapiens
caaagcgcuucucuuuagagug

SEQ ID NO: 130 - RNA, 22 nt, Homo sapiens
cuacaaagggaagcacuuucuc

SEQ ID NO: 131 - RNA, 22 nt, Homo sapiens
ugugacagauugauaacugaaa

SEQ ID NO: 132 - RNA, 20 nt, Homo sapiens
auucugcauuuuuagcaagu

SEQ ID NO: 133 - RNA, 22 nt, Homo sapiens
aucagcaaacauuuauugugug

SEQ ID NO: 134 - RNA, 22 nt, Homo sapiens
ugucuuacucccucaggcacau

SEQ ID NO: 135 - RNA, 21 nt, Homo sapiens
aacaggugacugguuagacaa

SEQ ID NO: 136 - RNA, 21 nt, Homo sapiens
aagccugcccggcuccucggg

SEQ ID NO: 137 - RNA, 22 nt, Homo sapiens
uggucuaggauuguuggaggag

SEQ ID NO: 138 - RNA, 25 nt, Homo sapiens
aggggugguguugggacagcuccgu

SEQ ID NO: 139 - RNA, 20 nt, Homo sapiens
aggguguuucucucaucucu

SEQ ID NO: 140 - RNA, 22 nt, Homo sapiens
agacuucccauuugaagguggc

SEQ ID NO: 141 - RNA, 22 nt, Homo sapiens
gugagucucuaagaaaagagga

SEQ ID NO: 142 - RNA, 19 nt, Homo sapiens
gugucugcuuccuguggga

SEQ ID NO: 143 - RNA, 19 nt, Homo sapiens
aguguggcuuucuuagagc

SEQ ID NO: 144 - RNA, 22 nt, Homo sapiens
cuugguucagggagggucccca

SEQ ID NO: 145 - RNA, 22 nt, Homo sapiens
ugagaccucuggguucugagcu

SEQ ID NO: 146 - RNA, 24 nt, Homo sapiens
gauugcucugcgugcggaaucgac

SEQ ID NO: 147 - RNA, 22 nt, Homo sapiens
uaaugccccuaaaaauccuuau

SEQ ID NO: 148 - RNA, 23 nt, Homo sapiens
uguaguguuuccuacuuuaugga

SEQ ID NO: 149 - RNA, 22 nt, Homo sapiens
uaacacugucugguaacgaugu

SEQ ID NO: 150 - RNA, 22 nt, Homo sapiens
uuaucagaaucuccagggguac

SEQ ID NO: 151 - RNA, 22 nt, Mus musculus
uagcagcacguaaauauuggcg

SEQ ID NO: 152 - RNA, 22 nt, Rattus norvegicus
uagcagcacguaaauauuggcg

SEQ ID NO: 153 - RNA, 22 nt, Ateles geoffroyi
uagcagcacguaaauauuggcg

SEQ ID NO: 154 - RNA, 22 nt, Lagothrix lagotricha
uagcagcacguaaauauuggcg

SEQ ID NO: 155 - RNA, 22 nt, Saguinus labiatus
uagcagcacguaaauauuggcg

SEQ ID NO: 156 - RNA, 22 nt, Macaca mulatta
uagcagcacguaaauauuggcg

SEQ ID NO: 157 - RNA, 22 nt, Macaca nemestrina
uagcagcacguaaauauuggcg

SEQ ID NO: 158 - RNA, 22 nt, Gorilla gorilla
uagcagcacguaaauauuggcg

SEQ ID NO: 159 - RNA, 22 nt, Pan paniscus
uagcagcacguaaauauuggcg

SEQ ID NO: 160 - RNA, 22 nt, Pan troglodytes
uagcagcacguaaauauuggcg

SEQ ID NO: 161 - RNA, 22 nt, Pongo pygmaeus
uagcagcacguaaauauuggcg

SEQ ID NO: 162 - RNA, 22 nt, Lemur catta
uagcagcacguaaauauuggug

SEQ ID NO: 163 - RNA, 22 nt, Canis familiaris
uagcagcacguaaauauuggcg

SEQ ID NO: 164 - RNA, 22 nt, Monodelphis domestica
uagcagcacguaaauauuggcg

SEQ ID NO: 165 - RNA, 22 nt, Gallus gallus
uagcagcacguaaauauuggug

SEQ ID NO: 166 - RNA, 22 nt, Xenopus tropicalis
uagcagcacguaaauauuggug

SEQ ID NO: 167 - RNA, 22 nt, Xenopus tropicalis
uagcagcacguaaauauugggu

SEQ ID NO: 168 - RNA, 21 nt, Bos taurus
uagcagcacguaaauauuggc

SEQ ID NO: 169 - RNA, 22 nt, Danio rerio
uagcagcacguaaauauuggug

SEQ ID NO: 170 - RNA, 22 nt, Danio rerio
uagcagcacguaaauauuggag

SEQ ID NO: 171 - RNA, 22 nt, Danio rerio
uagcagcauguaaauauuggag

SEQ ID NO: 172 - RNA, 22 nt, Fugu rubripes
uagcagcacguaaauauuggag

SEQ ID NO: 173 - RNA, 22 nt, Tetraodon nigroviridis
uagcagcacguaaauauuggag

SEQ ID NO: 174 - RNA, 21 nt, Mus musculus
uagcagcacagaaauauuggc

SEQ ID NO: 175 - RNA, 21 nt, Rattus norvegicus
uagcagcacagaaauauuggc

SEQ ID NO: 176 - RNA, 21 nt, Macaca mulatta
uagcagcacagaaauauuggc

SEQ ID NO: 177 - RNA, 21 nt, Gorilla gorilla
uagcagcacagaaauauuggc

SEQ ID NO: 178 - RNA, 21 nt, Pan paniscus
uagcagcacagaaauauuggc

SEQ ID NO: 179 - RNA, 22 nt, Canis familiaris
uagcagcacagaaauauuggca

SEQ ID NO: 180 - RNA, 22 nt, Bos taurus
uagcagcacagaaauauuggca

SEQ ID NO: 181 - RNA, 22 nt, Rattus norvegicus
acugcagugaaggcacuugugg

SEQ ID NO: 182 - RNA, 20 nt, Ateles geoffroyi
acugcagugaaggcacuugu

SEQ ID NO: 183 - RNA, 20 nt, Lagothrix lagotricha
acugcagugaaggcacuugu

SEQ ID NO: 184 - RNA, 20 nt, Saguinus labiatus
acugcagugaaggcacuugu

SEQ ID NO: 185 - RNA, 20 nt, Macaca mulatta
acugcagugaaggcacuugu

SEQ ID NO: 186 - RNA, 20 nt, Macaca nemestrina
acugcagugaaggcacuugu

SEQ ID NO: 187 - RNA, 20 nt, Gorilla gorilla
acugcagugaaggcacuugu

SEQ ID NO: 188 - RNA, 20 nt, Pan paniscus
acugcagugaaggcacuugu

SEQ ID NO: 189 - RNA, 20 nt, Pan troglodytes
acugcagugaaggcacuugu

SEQ ID NO: 190 - RNA, 20 nt, Pongo pygmaeus
acugcagugaaggcacuugu

SEQ ID NO: 191 - RNA, 20 nt, Lemur catta
acugcagugaaggcacuugu

SEQ ID NO: 192 - RNA, 21 nt, Monodelphis domestica
acugcagugaaggcacuugua

SEQ ID NO: 193 - RNA, 20 nt, Gallus gallus
acugcagugaaggcacuugu

SEQ ID NO: 194 - RNA, 20 nt, Xenopus tropicalis
acugcagugaaggcacuugu

SEQ ID NO: 195 - RNA, 20 nt, Bos taurus
acugcagugaaggcacuugu

SEQ ID NO: 196 - RNA, 23 nt, Mus musculus
uaaggugcaucuagugcagauag

SEQ ID NO: 197 - RNA, 23 nt, Rattus norvegicus
uaaggugcaucuagugcagauag

SEQ ID NO: 198 - RNA, 22 nt, Ateles geoffroyi
uaaggugcaucuagugcagaua

SEQ ID NO: 199 - RNA, 22 nt, Lagothrix lagotricha
uaaggugcaucuagugcagaua

SEQ ID NO: 200 - RNA, 22 nt, Saguinus labiatus
uaaggugcaucuagugcagaua

SEQ ID NO: 201 - RNA, 22 nt, Macaca mulatta
uaaggugcaucuagugcagaua

SEQ ID NO: 202 - RNA, 22 nt, Macaca nemestrina
uaaggugcaucuagugcagaua

SEQ ID NO: 203 - RNA, 22 nt, Gorilla gorilla
uaaggugcaucuagugcagaua

SEQ ID NO: 204 - RNA, 22 nt, Pan paniscus
uaaggugcaucuagugcagaua

SEQ ID NO: 205 - RNA, 22 nt, Pan troglodytes
uaaggugcaucuagugcagaua

SEQ ID NO: 206 - RNA, 22 nt, Pongo pygmaeus
uaaggugcaucuagugcagaua

SEQ ID NO: 207 - RNA, 22 nt, Lemur catta
uaaggugcaucuagugcagaua

SEQ ID NO: 208 - RNA, 22 nt, Monodelphis domestica
uaaggugcaucuagugcagaua

SEQ ID NO: 209 - RNA, 22 nt, Gallus gallus
uaaggugcaucuagugcagaua

SEQ ID NO: 210 - RNA, 23 nt, Xenopus tropicalis
uaaggugcaucuagugcagauag

SEQ ID NO: 211 - RNA, 22 nt, Bos taurus
uaaggugcaucuagugcagaua

SEQ ID NO: 212 - RNA, 22 nt, Sus scrofa
uaaggugcaucuagugcagaua

SEQ ID NO: 213 - RNA, 22 nt, Danio rerio
uaaggugcaucuagugcagaua

SEQ ID NO: 214 - RNA, 22 nt, Danio rerio
uaaggugcaucuuguguaguua

SEQ ID NO: 215 - RNA, 22 nt, Fugu rubripes
uaaggugcaucuagugcagaua

SEQ ID NO: 216 - RNA, 22 nt, Tetraodon nigroviridis
uaaggugcaucuagugcagaua

SEQ ID NO: 217 - RNA, 23 nt, Mus musculus
uaaggugcaucuagugcuguuag

SEQ ID NO: 218 - RNA, 23 nt, Macaca mulatta
uaaggugcaucuagugcaguuag

SEQ ID NO: 219 - RNA, 22 nt, Gallus gallus
uaaggugcaucuagugcaguua

SEQ ID NO: 220 - RNA, 23 nt, Xenopus tropicalis
uaaggugcaucuagugcaguuag

SEQ ID NO: 221 - RNA, 22 nt, Bos taurus
uaaggugcaucuagugcaguua

SEQ ID NO: 222 - RNA, 22 nt, Danio rerio
uaaggugcauuuagugcagaua

SEQ ID NO: 223 - RNA, 23 nt, Mus musculus
caaagugcucauagugcagguag

SEQ ID NO: 224 - RNA, 23 nt, Rattus norvegicus
uaaagugcuuauagugcagguag

SEQ ID NO: 225 - RNA, 22 nt, Ateles geoffroyi
uaaagugcuuauagugcaggua

SEQ ID NO: 226 - RNA, 22 nt, Lagothrix lagotricha
uaaagugcuuauagugcaggua

SEQ ID NO: 227 - RNA, 22 nt, Saguinus labiatus
uaaagugcuuauagugcaggua

SEQ ID NO: 228 - RNA, 22 nt, Macaca mulatta
uaaagugcuuauagugcaggua

SEQ ID NO: 229 - RNA, 23 nt, Macaca mulatta
caaagugcucauagugcagguag

SEQ ID NO: 230 - RNA, 22 nt, Macaca nemestrina
uaaagugcuuauagugcaggua

SEQ ID NO: 231 - RNA, 22 nt, Gorilla gorilla
uaaagugcuuauagugcaggua

SEQ ID NO: 232 - RNA, 22 nt, Pan paniscus
uaaagugcuuauagugcaggua

SEQ ID NO: 233 - RNA, 22 nt, Pan troglodytes
uaaagugcuuauagugcaggua

SEQ ID NO: 234 - RNA, 22 nt, Pongo pygmaeus
uaaagugcuuauagugcaggua

SEQ ID NO: 235 - RNA, 22 nt, Lemur catta
uaaagugcuuauagugcaggua

SEQ ID NO: 236 - RNA, 23 nt, Canis familiaris
uaaagugcuuauagugcagguag

SEQ ID NO: 237 - RNA, 23 nt, Monodelphis domestica
uaaagugcuuauagugcagguag

SEQ ID NO: 238 - RNA, 23 nt, Gallus gallus
uaaagugcuuauagugcagguag

SEQ ID NO: 239 - RNA, 23 nt, Gallus gallus
caaagugcucauagugcagguag

SEQ ID NO: 240 - RNA, 23 nt, Xenopus laevis
caaagugcucauagugcagguag

SEQ ID NO: 241 - RNA, 23 nt, Xenopus tropicalis
uaaagugcuuauagugcagguag

SEQ ID NO: 242 - RNA, 23 nt, Xenopus tropicalis
caaagugcucauagugcagguag

SEQ ID NO: 243 - RNA, 23 nt, Bos taurus
uaaagugcuuauagugcagguag

SEQ ID NO: 244 - RNA, 22 nt, Bos taurus
caaagugcucacagugcaggua

SEQ ID NO: 245 - RNA, 22 nt, Sus scrofa
uaaagugcuuauagugcaggua

SEQ ID NO: 246 - RNA, 23 nt, Danio rerio
uaaagugcuuauagugcagguag

SEQ ID NO: 247 - RNA, 23 nt, Danio rerio
caaagugcucacagugcagguag

SEQ ID NO: 248 - RNA, 23 nt, Fugu rubripes
uaaagugcuuauagugcagguag

SEQ ID NO: 249 - RNA, 23 nt, Tetraodon nigroviridis
uaaagugcuuauagugcagguag

SEQ ID NO: 250 - RNA, 22 nt, Mus musculus
uagcuuaucagacugauguuga

SEQ ID NO: 251 - RNA, 22 nt, Rattus norvegicus
uagcuuaucagacugauguuga

SEQ ID NO: 252 - RNA, 22 nt, Cricetulus griseus
uagcuuaucagacugauguuga

SEQ ID NO: 253 - RNA, 22 nt, Ateles geoffroyi
uagcuuaucagacugauguuga

SEQ ID NO: 254 - RNA, 22 nt, Macaca mulatta
uagcuuaucagacugauguuga

SEQ ID NO: 255 - RNA, 22 nt, Macaca nemestrina
uagcuuaucagacugauguuga

SEQ ID NO: 256 - RNA, 22 nt, Gorilla gorilla
uagcuuaucagacugauguuga

SEQ ID NO: 257 - RNA, 22 nt, Pan paniscus
uagcuuaucagacugauguuga

SEQ ID NO: 258 - RNA, 22 nt, Pan troglodytes
uagcuuaucagacugauguuga

SEQ ID NO: 259 - RNA, 22 nt, Pongo pygmaeus
uagcuuaucagacugauguuga

SEQ ID NO: 260 - RNA, 22 nt, Canis familiaris
uagcuuaucagacugauguuga

SEQ ID NO: 261 - RNA, 22 nt, Monodelphis domestica
uagcuuaucagacugauguuga

SEQ ID NO: 262 - RNA, 22 nt, Gallus gallus
uagcuuaucagacugauguuga

SEQ ID NO: 263 - RNA, 24 nt, Bos taurus
uagcuuaucagacugauguugacu

SEQ ID NO: 264 - RNA, 22 nt, Sus scrofa
uagcuuaucagacugauguuga

SEQ ID NO: 265 - RNA, 23 nt, Danio rerio
uagcuuaucagacugguguuggc

SEQ ID NO: 266 - RNA, 23 nt, Fugu rubripes
uagcuuaucagacugguguuggc

SEQ ID NO: 267 - RNA, 23 nt, Tetraodon nigroviridis
uagcuuaucagacugguguuggc

SEQ ID NO: 268 - RNA, 22 nt, Mus musculus
uggcucaguucagcaggaacag

SEQ ID NO: 269 - RNA, 22 nt, Rattus norvegicus
uggcucaguucagcaggaacag

SEQ ID NO: 270 - RNA, 22 nt, Macaca mulatta
uggcucaguucagcaggaacag

SEQ ID NO: 271 - RNA, 22 nt, Macaca nemestrina
uggcucaguucagcaggaacag

SEQ ID NO: 272 - RNA, 22 nt, Gorilla gorilla
uggcucaguucagcaggaacag

SEQ ID NO: 273 - RNA, 22 nt, Pan paniscus
uggcucaguucagcaggaacag

SEQ ID NO: 274 - RNA, 22 nt, Pan troglodytes
uggcucaguucagcaggaacag

SEQ ID NO: 275 - RNA, 22 nt, Pongo pygmaeus
uggcucaguucagcaggaacag

SEQ ID NO: 276 - RNA, 23 nt, Canis familiaris
uggcucaguucagcaggaacagg

SEQ ID NO: 277 - RNA, 16 nt, Monodelphis domestica
uggcucaguucagcag

SEQ ID NO: 278 - RNA, 22 nt, Gallus gallus
uggcucaguucagcaggaacag

SEQ ID NO: 279 - RNA, 21 nt, Xenopus tropicalis
uggcucaguucagcaggacag

SEQ ID NO: 280 - RNA, 22 nt, Bos taurus
uggcucaguucagcaggaacag

SEQ ID NO: 281 - RNA, 22 nt, Sus scrofa
uggcucaguucagcaggaacag

SEQ ID NO: 282 - RNA, 22 nt, Danio rerio
uggcucaguucagcaggaacag

SEQ ID NO: 283 - RNA, 22 nt, Fugu rubripes
uggcucaguucagcaggaacag

SEQ ID NO: 284 - RNA, 22 nt, Tetraodon nigroviridis
uggcucaguucagcaggaacag

SEQ ID NO: 285 - RNA, 22 nt, Mus musculus
cauugcacuugucucggucuga

SEQ ID NO: 286 - RNA, 22 nt, Rattus norvegicus
cauugcacuugucucggucuga

SEQ ID NO: 287 - RNA, 22 nt, Lagothrix lagotricha
cauugcacuugucucggucuga

SEQ ID NO: 288 - RNA, 22 nt, Macaca mulatta
cauugcacuugucucggucuga

SEQ ID NO: 289 - RNA, 22 nt, Macaca nemestrina
cauugcacuugucucggucuga

SEQ ID NO: 290 - RNA, 22 nt, Gorilla gorilla
cauugcacuugucucggucuga

SEQ ID NO: 291 - RNA, 22 nt, Pan paniscus
cauugcacuugucucggucuga

SEQ ID NO: 292 - RNA, 21 nt, Pan troglodytes
cauugcacuugucucggcuga

SEQ ID NO: 293 - RNA, 22 nt, Pongo pygmaeus
cauugcacuugucucggucuga

SEQ ID NO: 294 - RNA, 22 nt, Canis familiaris
cauugcacuugucucggucuga

SEQ ID NO: 295 - RNA, 22 nt, Monodelphis domestica
cauugcacuugucucggucuga

SEQ ID NO: 296 - RNA, 22 nt, Xenopus tropicalis
cauugcacuugucucggucuga

SEQ ID NO: 297 - RNA, 22 nt, Bos taurus
cauugcacuugucucggucuga

SEQ ID NO: 298 - RNA, 22 nt, Danio rerio
cauugcacuugucucggucuga

SEQ ID NO: 299 - RNA, 22 nt, Fugu rubripes
cauugcacuugucucggucuga

SEQ ID NO: 300 - RNA, 22 nt, Tetraodon nigroviridis
cauugcacuugucucggucuga

SEQ ID NO: 301 - RNA, 22 nt, Mus musculus
uauugcacauuacuaaguugca

SEQ ID NO: 302 - RNA, 22 nt, Rattus norvegicus
uauugcacauuacuaaguugca

SEQ ID NO: 303 - RNA, 21 nt, Saguinus labiatus
uauugcacauuacuaaguugc

SEQ ID NO: 304 - RNA, 21 nt, Macaca mulatta
uauugcacauuacuaaguugc

SEQ ID NO: 305 - RNA, 21 nt, Macaca nemestrina
uauugcacauuacuaaguugc

SEQ ID NO: 306 - RNA, 21 nt, Gorilla gorilla
uauugcacauuacuaaguugc

SEQ ID NO: 307 - RNA, 21 nt, Pan paniscus
uauugcacauuacuaaguugc

SEQ ID NO: 308 - RNA, 21 nt, Pan troglodytes
uauugcacauuacuaaguugc

SEQ ID NO: 309 - RNA, 21 nt, Pongo pygmaeus
uauugcacauuacuaaguugc

SEQ ID NO: 310 - RNA, 23 nt, Canis familiaris
uauugcacauuacuaaguugcau

SEQ ID NO: 311 - RNA, 21 nt, Monodelphis domestica
uauugcacauuacuaaguugc

SEQ ID NO: 312 - RNA, 21 nt, Gallus gallus
uauugcacauuacuaaguugc

SEQ ID NO: 313 - RNA, 21 nt, Sus scrofa
uauugcacauuacuaaguugc

SEQ ID NO: 314 - RNA, 21 nt, Mus musculus
uucaaguaauucaggauaggu

SEQ ID NO: 315 - RNA, 22 nt, Rattus norvegicus
uucaaguaauccaggauaggcu

SEQ ID NO: 316 - RNA, 21 nt, Rattus norvegicus
uucaaguaauucaggauaggu

SEQ ID NO: 317 - RNA, 22 nt, Lagothrix lagotricha
uucaaguaauccaggauaggcu

SEQ ID NO: 318 - RNA, 22 nt, Macaca mulatta
uucaaguaauccaggauaggcu

SEQ ID NO: 319 - RNA, 21 nt, Macaca mulatta
uucaaguaauucaggauaggu

SEQ ID NO: 320 - RNA, 22 nt, Macaca nemestrina
uucaaguaauccaggauaggcu

SEQ ID NO: 321 - RNA, 22 nt, Gorilla gorilla
uucaaguaauccaggauaggcu

SEQ ID NO: 322 - RNA, 22 nt, Pan paniscus
uucaaguaauccaggauaggcu

SEQ ID NO: 323 - RNA, 22 nt, Pan troglodytes
uucaaguaauccaggauaggcu

SEQ ID NO: 324 - RNA, 22 nt, Pongo pygmaeus
uucaaguaauccaggauaggcu

SEQ ID NO: 325 - RNA, 22 nt, Canis familiaris
uucaaguaauccaggauaggcu

SEQ ID NO: 326 - RNA, 22 nt, Canis familiaris
uucaaguaauucaggauagguu

SEQ ID NO: 327 - RNA, 21 nt, Gallus gallus
uucaaguaauccaggauaggc

SEQ ID NO: 328 - RNA, 21 nt, Xenopus tropicalis
uucaaguaauccaggauaggc

SEQ ID NO: 329 - RNA, 22 nt, Bos taurus
uucaaguaauccaggauaggcu

SEQ ID NO: 330 - RNA, 22 nt, Bos taurus
uucaaguaauucaggauagguu

SEQ ID NO: 331 - RNA, 22 nt, Sus scrofa
uucaaguaauccaggauaggcu

SEQ ID NO: 332 - RNA, 22 nt, Danio rerio
uucaaguaauccaggauaggcu

SEQ ID NO: 333 - RNA, 22 nt, Danio rerio
uucaaguaauccaggauagguu

SEQ ID NO: 334 - RNA, 22 nt, Fugu rubripes
uucaaguaauccaggauaggcu

SEQ ID NO: 335 - RNA, 22 nt, Tetraodon nigroviridis
uucaaguaauccaggauaggcu

SEQ ID NO: 336 - RNA, 22 nt, Rattus norvegicus
cuuucagucagauguuugcugc

SEQ ID NO: 337 - RNA, 22 nt, Rattus norvegicus
cuuucagucggauguuuacagc

SEQ ID NO: 338 - RNA, 22 nt, Macaca mulatta
cuuucagucggauguuugcagc

SEQ ID NO: 339 - RNA, 22 nt, Gorilla gorilla
cuuucagucggauguuugcagc

SEQ ID NO: 340 - RNA, 22 nt, Pan paniscus
cuuucagucggauguuugcagc

SEQ ID NO: 341 - RNA, 22 nt, Pan troglodytes
cuuucagucggauguuugcagc

SEQ ID NO: 342 - RNA, 22 nt, Pongo pygmaeus
cuuucagucggauguuugcagc

SEQ ID NO: 343 - RNA, 22 nt, Canis familiaris
cuuucagucggauguuuacagc

SEQ ID NO: 344 - RNA, 22 nt, Gallus gallus
cuuucagucggauguuugcagc

SEQ ID NO: 345 - RNA, 22 nt, Xenopus tropicalis
cuuucagucagauguuugcagc

SEQ ID NO: 346 - RNA, 22 nt, Danio rerio
cuuucagucggauguuugcagc

SEQ ID NO: 347 - RNA, 22 nt, Mus musculus
uggcagugucuuagcugguugu

SEQ ID NO: 348 - RNA, 23 nt, Mus musculus
aggcaguguaauuagcugauugu

SEQ ID NO: 349 - RNA, 22 nt, Rattus norvegicus
uggcagugucuuagcugguugu

SEQ ID NO: 350 - RNA, 23 nt, Rattus norvegicus
aggcaguguaguuagcugauugc

SEQ ID NO: 351 - RNA, 22 nt, Ateles geoffroyi
uggcagugucuuagcugguugu

SEQ ID NO: 352 - RNA, 22 nt, Lagothrix lagotricha
uggcagugucuuagcugguugu

SEQ ID NO: 353 - RNA, 22 nt, Saguinus labiatus
uggcagugucuuagcugguugu

SEQ ID NO: 354 - RNA, 22 nt, Macaca mulatta
uggcagugucuuagcugguugu

SEQ ID NO: 355 - RNA, 23 nt, Macaca mulatta
aggcaguguaguuagcugauugc

SEQ ID NO: 356 - RNA, 22 nt, Macaca nemestrina
uggcagugucuuagcugguugu

SEQ ID NO: 357 - RNA, 22 nt, Gorilla gorilla
uggcagugucuuagcugguugu

SEQ ID NO: 358 - RNA, 22 nt, Pan paniscus
uggcagugucuuagcugguugu

SEQ ID NO: 359 - RNA, 22 nt, Pan troglodytes
uggcagugucuuagcugguugu

SEQ ID NO: 360 - RNA, 22 nt, Pongo pygmaeus
uggcagugucuuagcugguugu

SEQ ID NO: 361 - RNA, 22 nt, Canis familiaris
uggcagugucuuagcugguugu

SEQ ID NO: 362 - RNA, 23 nt, Canis familiaris
aggcaguguaguuagcugauugc

SEQ ID NO: 363 - RNA, 23 nt, Monodelphis domestica
uggcagugucuuagcugguuguu

SEQ ID NO: 364 - RNA, 23 nt, Gallus gallus
uggcagugucuuagcugguuguu

SEQ ID NO: 365 - RNA, 23 nt, Gallus gallus
aggcaguguaguuagcugauugc

SEQ ID NO: 366 - RNA, 23 nt, Xenopus tropicalis
uggcagugucuuagcugguuguu

SEQ ID NO: 367 - RNA, 22 nt, Bos taurus
uggcagugucuuagcugguugu

SEQ ID NO: 368 - RNA, 22 nt, Bos taurus
aggcaguguaauuagcugauug

SEQ ID NO: 369 - RNA, 22 nt, Bos taurus
aggcaguguaguuagcugauug

SEQ ID NO: 370 - RNA, 22 nt, Danio rerio
uggcagugucuuagcugguugu

SEQ ID NO: 371 - RNA, 23 nt, Danio rerio
aggcagugcaguuaguugauuac

SEQ ID NO: 372 - RNA, 22 nt, Mus musculus
uggcaguguauuguuagcuggu

SEQ ID NO: 373 - RNA, 21 nt, Mus musculus
aggcagugcauugcuagcugg

SEQ ID NO: 374 - RNA, 22 nt, Rattus norvegicus
uggcaguguauuguuagcuggu

SEQ ID NO: 375 - RNA, 22 nt, Macaca mulatta
uggcaguguauuguuagcuggu

SEQ ID NO: 376 - RNA, 22 nt, Canis familiaris
uggcaguguauuguuagcuggu

SEQ ID NO: 377 - RNA, 22 nt, Monodelphis domestica
uggcaguguauuguuagcuggu

SEQ ID NO: 378 - RNA, 21 nt, Gallus gallus
uggcaguguauguuagcuggu

SEQ ID NO: 379 - RNA, 22 nt, Xenopus tropicalis
aggcaguguaauguuagcuggu

SEQ ID NO: 380 - RNA, 20 nt, Mus musculus
aggcaguguuguuagcuggc

SEQ ID NO: 381 - RNA, 22 nt, Macaca mulatta
aggcaguguauuguuagcuggc

SEQ ID NO: 382 - RNA, 23 nt, Mus musculus
agcagcauuguacagggcuauca

SEQ ID NO: 383 - RNA, 23 nt, Rattus norvegicus
agcagcauuguacagggcuauca

SEQ ID NO: 384 - RNA, 23 nt, Lagothrix lagotricha
agcagcauuguacagggcuauca

SEQ ID NO: 385 - RNA, 23 nt, Macaca mulatta
agcagcauuguacagggcuauca

SEQ ID NO: 386 - RNA, 23 nt, Macaca nemestrina
agcagcauuguacagggcuauca

SEQ ID NO: 387 - RNA, 23 nt, Gorilla gorilla
agcagcauuguacagggcuauca

SEQ ID NO: 388 - RNA, 23 nt, Pan paniscus
agcagcauuguacagggcuauca

SEQ ID NO: 389 - RNA, 23 nt, Pan troglodytes
agcagcauuguacagggcuauca

SEQ ID NO: 390 - RNA, 23 nt, Pongo pygmaeus
agcagcauuguacagggcuauca

SEQ ID NO: 391 - RNA, 21 nt, Canis familiaris
agcagcauuguacagggcuau

SEQ ID NO: 392 - RNA, 23 nt, Monodelphis domestica
agcagcauuguacagggcuauca

SEQ ID NO: 393 - RNA, 23 nt, Gallus gallus
agcagcauuguacagggcuauca

SEQ ID NO: 394 - RNA, 23 nt, Xenopus tropicalis
agcagcauuguacagggcuauca

SEQ ID NO: 395 - RNA, 22 nt, Bos taurus
agcagcauuguacagggcuauc

SEQ ID NO: 396 - RNA, 23 nt, Sus scrofa
agcagcauuguacagggcuauca

SEQ ID NO: 397 - RNA, 23 nt, Danio rerio
agcagcauuguacagggcuauca

SEQ ID NO: 398 - RNA, 23 nt, Fugu rubripes
agcagcauuguacagggcuauca

SEQ ID NO: 399 - RNA, 23 nt, Tetraodon nigroviridis
agcagcauuguacagggcuauca

SEQ ID NO: 400 - RNA, 21 nt, Pan troglodytes
agugguuuuacccuaugguag

SEQ ID NO: 401 - RNA, 21 nt, Gallus gallus
agugguuuuacccuaugguag

SEQ ID NO: 402 - RNA, 21 nt, Xenopus tropicalis
agugguuuuacccuaugguag

SEQ ID NO: 403 - RNA, 21 nt, Sus scrofa
agugguuuuacccuaugguag

SEQ ID NO: 404 - RNA, 22 nt, Mus musculus
ucagugcaucacagaacuuugu

SEQ ID NO: 405 - RNA, 22 nt, Macaca mulatta
ucagugcacuacagaacuuugu

SEQ ID NO: 406 - RNA, 22 nt, Macaca mulatta
ucagugcaucacagaacuuugu

SEQ ID NO: 407 - RNA, 22 nt, Canis familiaris
ucagugcacuacagaacuuugu

SEQ ID NO: 408 - RNA, 22 nt, Canis familiaris
ucagugcaucacagaacuuugu

SEQ ID NO: 409 - RNA, 22 nt, Gallus gallus
ucagugcacuacagaacuuugu

SEQ ID NO: 410 - RNA, 22 nt, Xenopus tropicalis
ucagugcacuacagaacuuugu

SEQ ID NO: 411 - RNA, 22 nt, Xenopus tropicalis
ucagugcaucacagaacuuugu

SEQ ID NO: 412 - RNA, 22 nt, Bos taurus
ucagugcacuacagaacuuugu

SEQ ID NO: 413 - RNA, 22 nt, Bos taurus
ucagugcaucacagaacuuugu

SEQ ID NO: 414 - RNA, 22 nt, Sus scrofa
ucagugcacuacagaacuuugu

SEQ ID NO: 415 - RNA, 22 nt, Danio rerio
ucagugcauuacagaacuuugu

SEQ ID NO: 416 - RNA, 22 nt, Fugu rubripes
ucagugcauuacagaacuuugu

SEQ ID NO: 417 - RNA, 22 nt, Tetraodon nigroviridis
ucagugcauuacagaacuuugu

SEQ ID NO: 418 - RNA, 22 nt, Mus musculus
ugauauguuugauauauuaggu

SEQ ID NO: 419 - RNA, 22 nt, Rattus norvegicus
ugauauguuugauauauuaggu

SEQ ID NO: 420 - RNA, 21 nt, Rattus norvegicus
ugauauguuugauauuagguu

SEQ ID NO: 421 - RNA, 22 nt, Macaca mulatta
ugauauguuugauauauuaggu

SEQ ID NO: 422 - RNA, 21 nt, Macaca mulatta
ugauauguuugauauuggguu

SEQ ID NO: 423 - RNA, 22 nt, Gorilla gorilla
ugauauguuugauauauuaggu

SEQ ID NO: 424 - RNA, 22 nt, Pan paniscus
ugauauguuugauauauuaggu

SEQ ID NO: 425 - RNA, 22 nt, Pan troglodytes
ugauauguuugauauauuaggu

SEQ ID NO: 426 - RNA, 22 nt, Gallus gallus
ugauauguuugauauauuaggu

SEQ ID NO: 427 - RNA, 22 nt, Danio rerio
ugauauguuugauauauuaggu

SEQ ID NO: 428 - RNA, 22 nt, Danio rerio
ugauauguuugauauucgguug

SEQ ID NO: 429 - RNA, 22 nt, Fugu rubripes
ugauauguuugauauauuaggu

SEQ ID NO: 430 - RNA, 22 nt, Tetraodon nigroviridis
ugauauguuugauauauuaggu

SEQ ID NO: 431 - RNA, 23 nt, Lagothrix lagotricha
cccaguguucagacuaccuguuc

SEQ ID NO: 432 - RNA, 23 nt, Saguinus labiatus
cccaguguucagacuaccuguuc

SEQ ID NO: 433 - RNA, 23 nt, Macaca mulatta
cccaguguucagacuaccuguuc

SEQ ID NO: 434 - RNA, 23 nt, Macaca nemestrina
cccaguguucagacuaccuguuc

SEQ ID NO: 435 - RNA, 23 nt, Gorilla gorilla
cccaguguucagacuaccuguuc

SEQ ID NO: 436 - RNA, 23 nt, Pan paniscus
cccaguguucagacuaccuguuc

SEQ ID NO: 437 - RNA, 23 nt, Pan troglodytes
cccaguguucagacuaccuguuc

SEQ ID NO: 438 - RNA, 23 nt, Pongo pygmaeus
cccaguguucagacuaccuguuc

SEQ ID NO: 439 - RNA, 23 nt, Xenopus tropicalis
cccaguguucagacuaccuguuc

SEQ ID NO: 440 - RNA, 23 nt, Danio rerio
cccaguguucagacuaccuguuc

SEQ ID NO: 441 - RNA, 23 nt, Fugu rubripes
cccaguguucagacuaccuguuc

SEQ ID NO: 442 - RNA, 23 nt, Tetraodon nigroviridis
cccaguguucagacuaccuguuc

SEQ ID NO: 443 - RNA, 23 nt, Monodelphis domestica
cccaguguuuagacuaucuguuc

SEQ ID NO: 444 - RNA, 23 nt, Xenopus tropicalis
cccaguguucagacuacguguuc

SEQ ID NO: 445 - RNA, 23 nt, Bos taurus
cccaguguuuagacuaucuguuc

SEQ ID NO: 446 - RNA, 22 nt, Gallus gallus
uuuccuaugcauauacuucuuu

SEQ ID NO: 447 - RNA, 22 nt, Xenopus tropicalis
uuuccuaugcauauaccucuuu

SEQ ID NO: 448 - RNA, 22 nt, Mus musculus
auaagacgaacaaaagguuugu

SEQ ID NO: 449 - RNA, 22 nt, Rattus norvegicus
auaagacgagcaaaaagcuugu

SEQ ID NO: 450 - RNA, 22 nt, Macaca mulatta
auaagacgagcaaaaagcuugu

SEQ ID NO: 451 - RNA, 22 nt, Macaca mulatta
auaagacgaacaaaagguuugu

SEQ ID NO: 452 - RNA, 22 nt, Monodelphis domestica
auaagacgagcaaaaagcucgu

SEQ ID NO: 453 - RNA, 22 nt, Xenopus tropicalis
auaagacgagcauaaagcuugu

SEQ ID NO: 454 - RNA, 22 nt, Mus musculus
cugugcgugugacagcggcuga

SEQ ID NO: 455 - RNA, 22 nt, Rattus norvegicus
cugugcgugugacagcggcuga

SEQ ID NO: 456 - RNA, 22 nt, Macaca mulatta
cugugcgugugacagcggcuga

SEQ ID NO: 457 - RNA, 22 nt, Xenopus tropicalis
cugugcgugugacagcggcuaa

SEQ ID NO: 458 - RNA, 22 nt, Danio rerio
cugugcgugugacagcggcuaa

SEQ ID NO: 459 - RNA, 22 nt, Fugu rubripes
cugugcgugugacagcggcuaa

SEQ ID NO: 460 - RNA, 22 nt, Tetraodon nigroviridis
cugugcgugugacagcggcuaa

SEQ ID NO: 461 - RNA, 22 nt, Mus musculus
uucccuuugucauccuuugccu

SEQ ID NO: 462 - RNA, 22 nt, Rattus norvegicus
uucccuuugucauccuuugccu

SEQ ID NO: 463 - RNA, 22 nt, Macaca mulatta
uucccuuugucauccuuugccu

SEQ ID NO: 464 - RNA, 22 nt, Macaca nemestrina
uucccuuugucauccuucgccu

SEQ ID NO: 465 - RNA, 22 nt, Pongo pygmaeus
uucccuuugucauccuucgccu

SEQ ID NO: 466 - RNA, 22 nt, Gallus gallus
uucccuuugucauccuaugccu

SEQ ID NO: 467 - RNA, 22 nt, Mus musculus
acagcaggcacagacaggcagu

SEQ ID NO: 468 - RNA, 21 nt, Rattus norvegicus
acagcaggcacagacaggcag

SEQ ID NO: 469 - RNA, 21 nt, Ateles geoffroyi
acagcaggcacagacaggcag

SEQ ID NO: 470 - RNA, 21 nt, Saguinus labiatus
acagcaggcacagacaggcag

SEQ ID NO: 471 - RNA, 21 nt, Macaca mulatta
acagcaggcacagacaggcag

SEQ ID NO: 472 - RNA, 21 nt, Macaca nemestrina
acagcaggcacagacaggcag

SEQ ID NO: 473 - RNA, 21 nt, Gorilla gorilla
acagcaggcacagacaggcag

SEQ ID NO: 474 - RNA, 21 nt, Pan paniscus
acagcaggcacagacaggcag

SEQ ID NO: 475 - RNA, 21 nt, Pan troglodytes
acagcaggcacagacaggcag

SEQ ID NO: 476 - RNA, 21 nt, Pongo pygmaeus
acagcaggcacagacaggcag

SEQ ID NO: 477 - RNA, 21 nt, Monodelphis domestica
acagcaggcacagacaggcag

SEQ ID NO: 478 - RNA, 21 nt, Xenopus tropicalis
acagcaggcacagacaggcag

SEQ ID NO: 479 - RNA, 22 nt, Bos taurus
acagcaggcacagacaggcagu

SEQ ID NO: 480 - RNA, 21 nt, Sus scrofa
acagcaggcacagacaggcag

SEQ ID NO: 481 - RNA, 21 nt, Danio rerio
acagcaggcacagacaggcag

SEQ ID NO: 482 - RNA, 21 nt, Fugu rubripes
acagcaggcacagacaggcag

SEQ ID NO: 483 - RNA, 21 nt, Tetraodon nigroviridis
acagcaggcacagacaggcag

SEQ ID NO: 484 - RNA, 21 nt, Mus musculus
uugugcuugaucuaaccaugu

SEQ ID NO: 485 - RNA, 21 nt, Rattus norvegicus
uugugcuugaucuaaccaugu

SEQ ID NO: 486 - RNA, 21 nt, Ateles geoffroyi
uugugcuugaucuaaccaugu

SEQ ID NO: 487 - RNA, 21 nt, Lagothrix lagotricha
uugugcuugaucuaaccaugu

SEQ ID NO: 488 - RNA, 21 nt, Saguinus labiatus
uugugcuugaucuaaccaugu

SEQ ID NO: 489 - RNA, 21 nt, Macaca mulatta
uugugcuugaucuaaccaugu

SEQ ID NO: 490 - RNA, 21 nt, Macaca nemestrina
uugugcuugaucuaaccaugu

SEQ ID NO: 491 - RNA, 21 nt, Gorilla gorilla
uugugcuugaucuaaccaugu

SEQ ID NO: 492 - RNA, 21 nt, Pan paniscus
uugugcuugaucuaaccaugu

SEQ ID NO: 493 - RNA, 21 nt, Pan troglodytes
uugugcuugaucuaaccaugu

SEQ ID NO: 494 - RNA, 21 nt, Pongo pygmaeus
uugugcuugaucuaaccaugu

SEQ ID NO: 495 - RNA, 21 nt, Lemur catta
uugugcuugaucuaaccaugu

SEQ ID NO: 496 - RNA, 21 nt, Canis familiaris
uugugcuugaucuaaccaugu

SEQ ID NO: 497 - RNA, 21 nt, Monodelphis domestica
uugugcuugaucuaaccaugu

SEQ ID NO: 498 - RNA, 21 nt, Gallus gallus
uugugcuugaucuaaccaugu

SEQ ID NO: 499 - RNA, 21 nt, Xenopus tropicalis
uugugcuugaucuaaccaugu

SEQ ID NO: 500 - RNA, 21 nt, Bos taurus
uugugcuugaucuaaccaugu

SEQ ID NO: 501 - RNA, 22 nt, Danio rerio
uugugcuugaucuaaccaugca

SEQ ID NO: 502 - RNA, 22 nt, Fugu rubripes
uugugcuugaucuaaccaugug

SEQ ID NO: 503 - RNA, 22 nt, Fugu rubripes
uugugcuugaucuaaccaugca

SEQ ID NO: 504 - RNA, 22 nt, Tetraodon nigroviridis
uugugcuugaucuaaccaugug

SEQ ID NO: 505 - RNA, 22 nt, Tetraodon nigroviridis
uugugcuugaucuaaccaugca

SEQ ID NO: 506 - RNA, 22 nt, Macaca mulatta
ugguuuaccgucccacauacau

SEQ ID NO: 507 - RNA, 23 nt, Macaca mulatta
ccuaguagguguccaguaagugu

SEQ ID NO: 508 - RNA, 23 nt, Sus scrofa
ccuaguagguguucaguaagugu

SEQ ID NO: 509 - RNA, 22 nt, Mus musculus
cuggcccucucugcccuuccgu

SEQ ID NO: 510 - RNA, 22 nt, Rattus norvegicus
cuggcccucucugcccuuccgu

SEQ ID NO: 511 - RNA, 22 nt, Canis familiaris
cuggcccucucugcccuuccgu

SEQ ID NO: 512 - RNA, 22 nt, Mus musculus
aacacacccagcuaaccuuuuu

SEQ ID NO: 513 - RNA, 22 nt, Rattus norvegicus
aacacacccagcuaaccuuuuu

SEQ ID NO: 514 - RNA, 22 nt, Macaca mulatta
aacacaccugguuaaccucuuu

SEQ ID NO: 515 - RNA, 23 nt, Rattus norvegicus
uccagcaucagugauuuuguuga

SEQ ID NO: 516 - RNA, 23 nt, Canis familiaris
uccagcaucagugauuuuguuga

SEQ ID NO: 517 - RNA, 23 nt, Monodelphis domestica
uccagcaucagugauuuuguuga

SEQ ID NO: 518 - RNA, 22 nt, Xenopus tropicalis
uccagcaucagugauuuuguug

SEQ ID NO: 519 - RNA, 22 nt, Danio rerio
uccagcaucagugauuuuguug

SEQ ID NO: 520 - RNA, 22 nt, Fugu rubripes
uccagcaucagugauuuuguug

SEQ ID NO: 521 - RNA, 22 nt, Tetraodon nigroviridis
uccagcaucagugauuuuguug

SEQ ID NO: 522 - RNA, 23 nt, Xenopus tropicalis
aaugacacgaucacucccguuga

SEQ ID NO: 523 - RNA, 22 nt, Mus musculus
ucaggcucaguccccucccgau

SEQ ID NO: 524 - RNA, 22 nt, Rattus norvegicus
ucaggcucaguccccucccgau

SEQ ID NO: 525 - RNA, 22 nt, Macaca mulatta
ucaggcucaguccccucccgau

SEQ ID NO: 526 - RNA, 22 nt, Bos taurus
ucaggcucaguccccucccgau

SEQ ID NO: 527 - RNA, 22 nt, Macaca mulatta
agaggcuggccgugaugaauuc

SEQ ID NO: 528 - RNA, 22 nt, Mus musculus
uccuguacugagcugccccgag

SEQ ID NO: 529 - RNA, 21 nt, Macaca mulatta
aaagugcuuccuuuuagaggg

SEQ ID NO: 530 - RNA, 23 nt, Macaca mulatta
aaagugcuuccuuuuagaggguu

SEQ ID NO: 531 - RNA, 21 nt, Macaca mulatta
aaagugcuuccuuuuagaggg

SEQ ID NO: 532 - RNA, 22 nt, Macaca mulatta
aagugcuuccuuuuagaggguu

SEQ ID NO: 533 - RNA, 22 nt, Macaca mulatta
acaaagugcuuccuuuuagagu

SEQ ID NO: 534 - RNA, 22 nt, Macaca mulatta
aaaaugguucccuuuagagugu

SEQ ID NO: 535 - RNA, 24 nt, Macaca mulatta
cugaagugaugcauaaccgaucag

SEQ ID NO: 536 - RNA, 21 nt, Macaca mulatta
aggaggcagcgcucucgggac

SEQ ID NO: 537 - RNA, 18 nt, Macaca mulatta
aggaggcagcgcucucag

SEQ ID NO: 538 - RNA, 22 nt, Macaca mulatta
uacccauugcauaucggaguug

SEQ ID NO: 539 - RNA, 22 nt, Canis familiaris
uacccauugcauaucggaguug

SEQ ID NO: 540 - RNA, 22 nt, Bos taurus
uacccauugcauaucggagcug

SEQ ID NO: 541 - RNA, 24 nt, Mus musculus
ugucacucggcucggcccacuacc

SEQ ID NO: 542 - RNA, 23 nt, Macaca mulatta
ugucacucggcucggcccacuac

SEQ ID NO: 543 - RNA, 23 nt, Macaca mulatta
uggugcggagagggcccacagug

SEQ ID NO: 544 - RNA, 21 nt, Macaca mulatta
uggaggagagggaaggugcug

SEQ ID NO: 545 - RNA, 22 nt, Mus musculus
uguaacagcaacuccaugugga

SEQ ID NO: 546 - RNA, 22 nt, Rattus norvegicus
uguaacagcaacuccaugugga

SEQ ID NO: 547 - RNA, 22 nt, Ateles geoffroyi
uguaacagcaacuccaugugga

SEQ ID NO: 548 - RNA, 22 nt, Macaca mulatta
uguaacagcaacuccaugugga

SEQ ID NO: 549 - RNA, 22 nt, Macaca nemestrina
uguaacagcaacuccaugugga

SEQ ID NO: 550 - RNA, 22 nt, Gorilla gorilla
uguaacagcaacuccaugugga

SEQ ID NO: 551 - RNA, 22 nt, Pan troglodytes
uguaacagcaacuccaugugga

SEQ ID NO: 552 - RNA, 22 nt, Pongo pygmaeus
uguaacagcaacuccaugugga

SEQ ID NO: 553 - RNA, 22 nt, Canis familiaris
uguaacagcaacuccaugugga

SEQ ID NO: 554 - RNA, 22 nt, Gallus gallus
uguaacagcaacuccaugugga

SEQ ID NO: 555 - RNA, 22 nt, Xenopus tropicalis
uguaacagcaacuccaugugga

SEQ ID NO: 556 - RNA, 22 nt, Danio rerio
uguaacagccgcuccaugugga

SEQ ID NO: 557 - RNA, 21 nt, Fugu rubripes
uguaacagcaacuccaugugg

SEQ ID NO: 558 - RNA, 21 nt, Tetraodon nigroviridis
uguaacagcaacuccaugugg

SEQ ID NO: 559 - RNA, 21 nt, Canis familiaris
augcaccugggcaaggauucu

SEQ ID NO: 560 - RNA, 22 nt, Mus musculus
uucaccaccuucuccacccagc

SEQ ID NO: 561 - RNA, 22 nt, Ateles geoffroyi
uucaccaccuucuccacccagc

SEQ ID NO: 562 - RNA, 22 nt, Macaca mulatta
uucaccaccuucuccacccagc

SEQ ID NO: 563 - RNA, 22 nt, Macaca nemestrina
uucaccaccuucuccacccggc

SEQ ID NO: 564 - RNA, 22 nt, Pan paniscus
uucaccaccuucuccacccagc

SEQ ID NO: 565 - RNA, 22 nt, Pan troglodytes
uucaccaccuucuccacccagc

SEQ ID NO: 566 - RNA, 22 nt, Pongo pygmaeus
uucaccaccuucuccacccagc

SEQ ID NO: 567 - RNA, 22 nt, Canis familiaris
uucaccaccuucuccacccagc

SEQ ID NO: 568 - RNA, 23 nt, Mus musculus
agcuacauugucugcuggguuuc

SEQ ID NO: 569 - RNA, 23 nt, Rattus norvegicus
agcuacauugucugcuggguuuc

SEQ ID NO: 570 - RNA, 23 nt, Macaca mulatta
agcuacauugucugcuggguuuc

SEQ ID NO: 571 - RNA, 23 nt, Gorilla gorilla
agcuacauugucugcuggguuuc

SEQ ID NO: 572 - RNA, 23 nt, Pan paniscus
agcuacauugucugcuggguuuc

SEQ ID NO: 573 - RNA, 23 nt, Pongo pygmaeus
agcuacauugucugcuggguuuc

SEQ ID NO: 574 - RNA, 22 nt, Canis familiaris
agcuacauugucugcuggguuu

SEQ ID NO: 575 - RNA, 23 nt, Monodelphis domestica
agcuacauugucugcuggguuuc

SEQ ID NO: 576 - RNA, 23 nt, Gallus gallus
agcuacauugucugcuggguuuc

SEQ ID NO: 577 - RNA, 23 nt, Xenopus tropicalis
agcuacauugucugcuggguuuc

SEQ ID NO: 578 - RNA, 22 nt, Bos taurus
agcuacauugucugcuggguuu

SEQ ID NO: 579 - RNA, 23 nt, Danio rerio
agcuacauugucugcuggguuuc

SEQ ID NO: 580 - RNA, 23 nt, Fugu rubripes
agcuacauugucugcuggguuuc

SEQ ID NO: 581 - RNA, 23 nt, Tetraodon nigroviridis
agcuacauugucugcuggguuuc

SEQ ID NO: 582 - RNA, 22 nt, Mus musculus
ugagguaguagguuguauaguu

SEQ ID NO: 583 - RNA, 22 nt, Mus musculus
ugagguaguagguugugugguu

SEQ ID NO: 584 - RNA, 22 nt, Mus musculus
ugagguaguagguuguaugguu

SEQ ID NO: 585 - RNA, 22 nt, Mus musculus
agagguaguagguugcauaguu

SEQ ID NO: 586 - RNA, 22 nt, Mus musculus
ugagguaggagguuguauaguu

SEQ ID NO: 587 - RNA, 22 nt, Mus musculus
ugagguaguagauuguauaguu

SEQ ID NO: 588 - RNA, 22 nt, Mus musculus
ugagguaguaguuugugcuguu

SEQ ID NO: 589 - RNA, 22 nt, Rattus norvegicus
ugagguaguagguuguauaguu

SEQ ID NO: 590 - RNA, 22 nt, Rattus norvegicus
ugagguaguagguugugugguu

SEQ ID NO: 591 - RNA, 22 nt, Rattus norvegicus
ugagguaguagguuguaugguu

SEQ ID NO: 592 - RNA, 22 nt, Rattus norvegicus
agagguaguagguugcauaguu

SEQ ID NO: 593 - RNA, 22 nt, Rattus norvegicus
ugagguaggagguuguauaguu

SEQ ID NO: 594 - RNA, 22 nt, Rattus norvegicus
ugagguaguagauuguauaguu

SEQ ID NO: 595 - RNA, 22 nt, Rattus norvegicus
ugagguaguaguuugugcuguu

SEQ ID NO: 596 - RNA, 22 nt, Macaca mulatta
ugagguaguagguuguauaguu

SEQ ID NO: 597 - RNA, 22 nt, Macaca mulatta
ugagguaguagguugugugguu

SEQ ID NO: 598 - RNA, 22 nt, Macaca mulatta
ugagguaguagguuguaugguu

SEQ ID NO: 599 - RNA, 22 nt, Macaca mulatta
agagguaguagguugcauaguu

SEQ ID NO: 600 - RNA, 22 nt, Macaca mulatta
ugagguaggagguuguauaguu

SEQ ID NO: 601 - RNA, 22 nt, Macaca mulatta
ugagguaguagauuguauaguu

SEQ ID NO: 602 - RNA, 22 nt, Macaca mulatta
ugagguaguaguuuguacaguu

SEQ ID NO: 603 - RNA, 22 nt, Macaca mulatta
ugagguaguaguuugugcuguu

SEQ ID NO: 604 - RNA, 22 nt, Canis familiaris
ugagguaguagguuguauaguu

SEQ ID NO: 605 - RNA, 22 nt, Canis familiaris
ugagguaguagguuguaugguu

SEQ ID NO: 606 - RNA, 22 nt, Canis familiaris
ugagguaggagguuguauaguu

SEQ ID NO: 607 - RNA, 22 nt, Canis familiaris
ugagguaguagauuguauaguu

SEQ ID NO: 608 - RNA, 22 nt, Canis familiaris
ugagguaguaguuuguacaguu

SEQ ID NO: 609 - RNA, 23 nt, Canis familiaris
ugagguaguagagugcaguaguu

SEQ ID NO: 610 - RNA, 22 nt, Monodelphis domestica
ugagguaguagguuguauaguu

SEQ ID NO: 611 - RNA, 22 nt, Monodelphis domestica
ugagguaguagguugugugguu

SEQ ID NO: 612 - RNA, 21 nt, Monodelphis domestica
agagguaguagguugcauagu

SEQ ID NO: 613 - RNA, 22 nt, Monodelphis domestica
ugagguaguagauuguauaguu

SEQ ID NO: 614 - RNA, 21 nt, Monodelphis domestica
ugagguaguaguuuguacagu

SEQ ID NO: 615 - RNA, 21 nt, Monodelphis domestica
ugagguaguaguuugugcugu

SEQ ID NO: 616 - RNA, 22 nt, Gallus gallus
ugagguaguagguuguauaguu

SEQ ID NO: 617 - RNA, 22 nt, Gallus gallus
ugagguaguagguugugugguu

SEQ ID NO: 618 - RNA, 22 nt, Gallus gallus
ugagguaguagguuguaugguu

SEQ ID NO: 619 - RNA, 21 nt, Gallus gallus
agagguaguggguugcauagu

SEQ ID NO: 620 - RNA, 22 nt, Gallus gallus
ugagguaguagauuguauaguu

SEQ ID NO: 621 - RNA, 21 nt, Gallus gallus
ugagguaguaguuuguacagu

SEQ ID NO: 622 - RNA, 21 nt, Gallus gallus
ugagguaguaguuugugcugu

SEQ ID NO: 623 - RNA, 22 nt, Gallus gallus
ugagguaguagguuguauaguu

SEQ ID NO: 624 - RNA, 22 nt, Gallus gallus
ugagguaguagauugaauaguu

SEQ ID NO: 625 - RNA, 22 nt, Xenopus tropicalis
ugagguaguagguuguauaguu

SEQ ID NO: 626 - RNA, 22 nt, Xenopus tropicalis
ugagguaguaguuuguguaguu

SEQ ID NO: 627 - RNA, 22 nt, Xenopus tropicalis
ugagguaguagguuguaugguu

SEQ ID NO: 628 - RNA, 22 nt, Xenopus tropicalis
ugagguaguagguuguuuaguu

SEQ ID NO: 629 - RNA, 22 nt, Xenopus tropicalis
ugagguaguagauuguauaguu

SEQ ID NO: 630 - RNA, 21 nt, Xenopus tropicalis
ugagguaguuguuuguacagu

SEQ ID NO: 631 - RNA, 21 nt, Xenopus tropicalis
ugagguaguaguuugugcugu

SEQ ID NO: 632 - RNA, 22 nt, Bos taurus
ugagguaguagguuguauaguu

SEQ ID NO: 633 - RNA, 22 nt, Bos taurus
ugagguaguagguugugugguu

SEQ ID NO: 634 - RNA, 22 nt, Bos taurus
ugagguaguagguuguaugguu

SEQ ID NO: 635 - RNA, 22 nt, Bos taurus
agagguaguagguugcauaguu

SEQ ID NO: 636 - RNA, 21 nt, Bos taurus
ugagguaggagguuguauagu

SEQ ID NO: 637 - RNA, 22 nt, Bos taurus
ugagguaguagauuguauaguu

SEQ ID NO: 638 - RNA, 22 nt, Bos taurus
ugagguaguaguuuguacaguu

SEQ ID NO: 639 - RNA, 22 nt, Bos taurus
ugagguaguaguuugugcuguu

SEQ ID NO: 640 - RNA, 22 nt, Sus scrofa
ugagguaguagguuguaugguu

SEQ ID NO: 641 - RNA, 22 nt, Sus scrofa
ugagguaguagauuguauaguu

SEQ ID NO: 642 - RNA, 19 nt, Sus scrofa
ugagguaguaguuugugcu

SEQ ID NO: 643 - RNA, 22 nt, Danio rerio
ugagguaguagguuguauaguu

SEQ ID NO: 644 - RNA, 22 nt, Danio rerio
ugagguaguagguugugugguu

SEQ ID NO: 645 - RNA, 22 nt, Danio rerio
ugagguaguagguuguaugguu

SEQ ID NO: 646 - RNA, 22 nt, Danio rerio
ugagguaguugguuguaugguu

SEQ ID NO: 647 - RNA, 22 nt, Danio rerio
ugagguaguagauugaauaguu

SEQ ID NO: 648 - RNA, 22 nt, Danio rerio
ugagguaguagauuguauaguu

SEQ ID NO: 649 - RNA, 22 nt, Danio rerio
ugagguaguaguuuguauaguu

SEQ ID NO: 650 - RNA, 22 nt, Danio rerio
ugagguaguaaguuguguuguu

SEQ ID NO: 651 - RNA, 22 nt, Danio rerio
ugagguaguaguuugugcuguu

SEQ ID NO: 652 - RNA, 22 nt, Danio rerio
ugagguaguuguuuguacaguu

SEQ ID NO: 653 - RNA, 22 nt, Fugu rubripes
ugagguaguagguuguauaguu

SEQ ID NO: 654 - RNA, 22 nt, Fugu rubripes
ugagguaguagguugugugguu

SEQ ID NO: 655 - RNA, 22 nt, Fugu rubripes
ugagguaguugguuguaugguu

SEQ ID NO: 656 - RNA, 22 nt, Fugu rubripes
ugagguaguagauugaauaguu

SEQ ID NO: 657 - RNA, 22 nt, Fugu rubripes
ugagguaguaguuuguauaguu

SEQ ID NO: 658 - RNA, 22 nt, Fugu rubripes
ugagguaguaaguuguguuguu

SEQ ID NO: 659 - RNA, 22 nt, Fugu rubripes
ugagguaguaguuugugcuguu

SEQ ID NO: 660 - RNA, 22 nt, Fugu rubripes
ugagguaguuuuuuguacaguu

SEQ ID NO: 661 - RNA, 22 nt, Tetraodon nigroviridis
ugagguaguagguuguauaguu

SEQ ID NO: 662 - RNA, 22 nt, Tetraodon nigroviridis
ugagguaguagguugugugguu

SEQ ID NO: 663 - RNA, 22 nt, Tetraodon nigroviridis
ugagguaguugguuguaugguu

SEQ ID NO: 664 - RNA, 22 nt, Tetraodon nigroviridis
ugagguaguagauugaauaguu

SEQ ID NO: 665 - RNA, 22 nt, Tetraodon nigroviridis
ugagguaguaguuuguauaguu

SEQ ID NO: 666 - RNA, 22 nt, Tetraodon nigroviridis
ugagguaguaaguuguguuguu

SEQ ID NO: 667 - RNA, 22 nt, Tetraodon nigroviridis
ugagguaguaguuugugcuguu

SEQ ID NO: 668 - RNA, 22 nt, Tetraodon nigroviridis
ugagguaguuuuuuguacaguu

SEQ ID NO: 669 - RNA, 22 nt, Mus musculus
uggaauguaaagaaguauguau

SEQ ID NO: 670 - RNA, 22 nt, Rattus norvegicus
uggaauguaaagaaguguguau

SEQ ID NO: 671 - RNA, 22 nt, Macaca mulatta
uggaauguaaagaaguauguau

SEQ ID NO: 672 - RNA, 21 nt, Pan paniscus
uggaauguaaagaaguaugua

SEQ ID NO: 673 - RNA, 21 nt, Canis familiaris
uggaauguaaagaaguaugua

SEQ ID NO: 674 - RNA, 21 nt, Monodelphis domestica
uggaauguaaagaaguaugua

SEQ ID NO: 675 - RNA, 21 nt, Gallus gallus
uggaauguaaagaaguaugua

SEQ ID NO: 676 - RNA, 21 nt, Gallus gallus
uggaauguuaagaaguaugua

SEQ ID NO: 677 - RNA, 21 nt, Xenopus tropicalis
uggaauguuaagaaguaugua

SEQ ID NO: 678 - RNA, 22 nt, Danio rerio
uggaauguaaagaaguauguau

SEQ ID NO: 679 - RNA, 22 nt, Fugu rubripes
uggaauguaaagaaguauguau

SEQ ID NO: 680 - RNA, 22 nt, Tetraodon nigroviridis
uggaauguaaagaaguauguau

SEQ ID NO: 681 - RNA, 22 nt, Mus musculus
uggaauguaaggaagugugugg

SEQ ID NO: 682 - RNA, 22 nt, Rattus norvegicus
uggaauguaaggaagugugugg

SEQ ID NO: 683 - RNA, 22 nt, Macaca mulatta
uggaauguaaggaagugugugg

SEQ ID NO: 684 - RNA, 22 nt, Macaca nemestrina
uggaauguaaggaagugugugg

SEQ ID NO: 685 - RNA, 22 nt, Pongo pygmaeus
uggaauguaaggaagugugugg

SEQ ID NO: 686 - RNA, 22 nt, Canis familiaris
uggaauguaaggaagugugugg

SEQ ID NO: 687 - RNA, 21 nt, Monodelphis domestica
uggaauguaaggaagugugug

SEQ ID NO: 688 - RNA, 22 nt, Gallus gallus
uggaauguaaggaagugugugg

SEQ ID NO: 689 - RNA, 22 nt, Xenopus tropicalis
uggaauguaaggaagugugugg

SEQ ID NO: 690 - RNA, 22 nt, Danio rerio
uggaauguaaggaagugugugg

SEQ ID NO: 691 - RNA, 23 nt, Mus musculus
ucuuugguuaucuagcuguauga

SEQ ID NO: 692 - RNA, 23 nt, Rattus norvegicus
ucuuugguuaucuagcuguauga

SEQ ID NO: 693 - RNA, 23 nt, Ateles geoffroyi
ucuuugguuaucuagcuguauga

SEQ ID NO: 694 - RNA, 23 nt, Lagothrix lagotricha
ucuuugguuaucuagcuguauga

SEQ ID NO: 695 - RNA, 23 nt, Macaca mulatta
ucuuugguuaucuagcuguauga

SEQ ID NO: 696 - RNA, 23 nt, Macaca nemestrina
ucuuugguuaucuagcuguauga

SEQ ID NO: 697 - RNA, 23 nt, Gorilla gorilla
ucuuugguuaucuagcuguauga

SEQ ID NO: 698 - RNA, 23 nt, Pan troglodytes
ucuuugguuaucuagcuguauga

SEQ ID NO: 699 - RNA, 23 nt, Canis familiaris
ucuuugguuaucuagcuguauga

SEQ ID NO: 700 - RNA, 23 nt, Monodelphis domestica
ucuuugguuaucuagcuguauga

SEQ ID NO: 701 - RNA, 23 nt, Gallus gallus
ucuuugguuaucuagcuguauga

SEQ ID NO: 702 - RNA, 22 nt, Xenopus tropicalis
ucuuugguuaucuagcuguaug

SEQ ID NO: 703 - RNA, 23 nt, Xenopus tropicalis
ucuuugguuaccuagcuguauga

SEQ ID NO: 704 - RNA, 23 nt, Danio rerio
ucuuugguuaucuagcuguauga

SEQ ID NO: 705 - RNA, 23 nt, Fugu rubripes
ucuuugguuaucuagcuguauga

SEQ ID NO: 706 - RNA, 23 nt, Tetraodon nigroviridis
ucuuugguuaucuagcuguauga

SEQ ID NO: 707 - RNA, 21 nt, Mus musculus
aucacauugccagggauuacc

SEQ ID NO: 708 - RNA, 21 nt, Rattus norvegicus
aucacauugccagggauuucc

SEQ ID NO: 709 - RNA, 21 nt, Rattus norvegicus
aucacauugccagggauuacc

SEQ ID NO: 710 - RNA, 21 nt, Ateles geoffroyi
aucacauugccagggauuucc

SEQ ID NO: 711 - RNA, 21 nt, Saguinus labiatus
aucacauugccagggauuucc

SEQ ID NO: 712 - RNA, 21 nt, Macaca mulatta
aucacauugccagggauuucc

SEQ ID NO: 713 - RNA, 21 nt, Macaca mulatta
aucacauugccagggauuacc

SEQ ID NO: 714 - RNA, 21 nt, Macaca nemestrina
aucacauugccagggauuucc

SEQ ID NO: 715 - RNA, 21 nt, Gorilla gorilla
aucacauugccagggauuucc

SEQ ID NO: 716 - RNA, 21 nt, Pan paniscus
aucacauugccagggauuucc

SEQ ID NO: 717 - RNA, 23 nt, Pan paniscus
aucacauugccagggauuaccac

SEQ ID NO: 718 - RNA, 21 nt, Pan troglodytes
aucacauugccagggauuucc

SEQ ID NO: 719 - RNA, 23 nt, Pan troglodytes
aucacauugccagggauuaccac

SEQ ID NO: 720 - RNA, 21 nt, Pongo pygmaeus
aucacauugccagggauuucc

SEQ ID NO: 721 - RNA, 23 nt, Pongo pygmaeus
aucacauugccagggauuaccac

SEQ ID NO: 722 - RNA, 21 nt, Lemur catta
aucacauugccagggauuucc

SEQ ID NO: 723 - RNA, 19 nt, Canis familiaris
aucacauugccagggauuu

SEQ ID NO: 724 - RNA, 19 nt, Canis familiaris
aucacauugccagggauua

SEQ ID NO: 725 - RNA, 20 nt, Monodelphis domestica
aucacauugccagggauuuc

SEQ ID NO: 726 - RNA, 21 nt, Monodelphis domestica
aucacauugccagggauuacc

SEQ ID NO: 727 - RNA, 21 nt, Gallus gallus
aucacauugccagggauuacc

SEQ ID NO: 728 - RNA, 21 nt, Xenopus tropicalis
aucacauugccagggauuucc

SEQ ID NO: 729 - RNA, 21 nt, Xenopus tropicalis
aucacauugccagggauuacc

SEQ ID NO: 730 - RNA, 22 nt, Bos taurus
aucacauugccagggauuucca

SEQ ID NO: 731 - RNA, 23 nt, Bos taurus
aucacauugccagggauuaccac

SEQ ID NO: 732 - RNA, 21 nt, Sus scrofa
aucacauugccagggauuucc

SEQ ID NO: 733 - RNA, 22 nt, Danio rerio
aucacauugccagggauuucca

SEQ ID NO: 734 - RNA, 22 nt, Danio rerio
aucacauugccagggauuacca

SEQ ID NO: 735 - RNA, 22 nt, Fugu rubripes
aucacauugccagggauuucca

SEQ ID NO: 736 - RNA, 22 nt, Fugu rubripes
aucacauugccagggauuacca

SEQ ID NO: 737 - RNA, 22 nt, Tetraodon nigroviridis
aucacauugccagggauuucca

SEQ ID NO: 738 - RNA, 22 nt, Tetraodon nigroviridis
aucacauugccagggauuacca

SEQ ID NO: 739 - RNA, 21 nt, Mus musculus
uucacaguggcuaaguucugc

SEQ ID NO: 740 - RNA, 21 nt, Rattus norvegicus
uucacaguggcuaaguuccgc

SEQ ID NO: 741 - RNA, 21 nt, Rattus norvegicus
uucacaguggcuaaguucugc

SEQ ID NO: 742 - RNA, 22 nt, Ateles geoffroyi
uucacaguggcuaaguuccgcc

SEQ ID NO: 743 - RNA, 22 nt, Saguinus labiatus
uucacaguggcuaaguuccgcc

SEQ ID NO: 744 - RNA, 22 nt, Macaca mulatta
uucacaguggcuaaguuccgcc

SEQ ID NO: 745 - RNA, 21 nt, Macaca mulatta
uucacaguggcuaaguucugc

SEQ ID NO: 746 - RNA, 22 nt, Macaca nemestrina
uucacaguggcuaaguuccgcc

SEQ ID NO: 747 - RNA, 22 nt, Gorilla gorilla
uucacaguggcuaaguuccgcc

SEQ ID NO: 748 - RNA, 22 nt, Pan paniscus
uucacaguggcuaaguuccgcc

SEQ ID NO: 749 - RNA, 22 nt, Pan troglodytes
uucacaguggcuaaguuccgcc

SEQ ID NO: 750 - RNA, 22 nt, Pongo pygmaeus
uucacaguggcuaaguuccgcc

SEQ ID NO: 751 - RNA, 22 nt, Lemur catta
uucacaguggcuaaguuccgcc

SEQ ID NO: 752 - RNA, 20 nt, Canis familiaris
uucacaguggcuaaguuccg

SEQ ID NO: 753 - RNA, 21 nt, Canis familiaris
uucacaguggcuaaguucugc

SEQ ID NO: 754 - RNA, 21 nt, Monodelphis domestica
uucacaguggcuaaguuccgc

SEQ ID NO: 755 - RNA, 21 nt, Monodelphis domestica
uucacaguggcuaaguucugc

SEQ ID NO: 756 - RNA, 21 nt, Gallus gallus
uucacaguggcuaaguucugc

SEQ ID NO: 757 - RNA, 21 nt, Xenopus tropicalis
uucacaguggcuaaguuccgc

SEQ ID NO: 758 - RNA, 21 nt, Xenopus tropicalis
uucacaguggcuaaguucugc

SEQ ID NO: 759 - RNA, 21 nt, Xenopus tropicalis
uucacaguggcuaaguuccac

SEQ ID NO: 760 - RNA, 20 nt, Bos taurus
uucacaguggcuaaguuccg

SEQ ID NO: 761 - RNA, 21 nt, Bos taurus
uucacaguggcuaaguucugc

SEQ ID NO: 762 - RNA, 21 nt, Sus scrofa
uucacaguggcuaaguuccgc

SEQ ID NO: 763 - RNA, 22 nt, Danio rerio
uucacaguggcuaaguuccgcu

SEQ ID NO: 764 - RNA, 22 nt, Danio rerio
uucacaguggcuaaguucugca

SEQ ID NO: 765 - RNA, 21 nt, Danio rerio
uucacagugguuaaguucugc

SEQ ID NO: 766 - RNA, 22 nt, Danio rerio
uucacaguggcuaaguucuuca

SEQ ID NO: 767 - RNA, 22 nt, Danio rerio
uucacaguggcuaaguucagug

SEQ ID NO: 768 - RNA, 22 nt, Fugu rubripes
uucacaguggcuaaguucugca

SEQ ID NO: 769 - RNA, 21 nt, Fugu rubripes
uucacagugguuaaguucugc

SEQ ID NO: 770 - RNA, 22 nt, Fugu rubripes
uucacaguggcuaaguucagug

SEQ ID NO: 771 - RNA, 22 nt, Tetraodon nigroviridis
uucacaguggcuaaguucugca

SEQ ID NO: 772 - RNA, 21 nt, Tetraodon nigroviridis
uucacagugguuaaguucugc

SEQ ID NO: 773 - RNA, 22 nt, Tetraodon nigroviridis
uucacaguggcuaaguucagug

SEQ ID NO: 774 - RNA, 22 nt, Mus musculus
aaggagcucacagucuauugag

SEQ ID NO: 775 - RNA, 22 nt, Rattus norvegicus
aaggagcucacagucuauugag

SEQ ID NO: 776 - RNA, 22 nt, Ateles geoffroyi
aaggagcucacagucuauugag

SEQ ID NO: 777 - RNA, 22 nt, Lagothrix lagotricha
aaggagcucacagucuauugag

SEQ ID NO: 778 - RNA, 22 nt, Saguinus labiatus
aaggagcucacagucuauugag

SEQ ID NO: 779 - RNA, 22 nt, Macaca mulatta
aaggagcucacagucuauugag

SEQ ID NO: 780 - RNA, 22 nt, Macaca nemestrina
aaggagcucacagucuauugag

SEQ ID NO: 781 - RNA, 22 nt, Gorilla gorilla
aaggagcucacagucuauugag

SEQ ID NO: 782 - RNA, 22 nt, Pan paniscus
aaggagcucacagucuauugag

SEQ ID NO: 783 - RNA, 22 nt, Pan troglodytes
aaggagcucacagucuauugag

SEQ ID NO: 784 - RNA, 22 nt, Pongo pygmaeus
aaggagcucacagucuauugag

SEQ ID NO: 785 - RNA, 22 nt, Sus scrofa
aaggagcucacacucuauugag

SEQ ID NO: 786 - RNA, 21 nt, Macaca mulatta
ggcaagaugcuggcauagcug

SEQ ID NO: 787 - RNA, 21 nt, Macaca nemestrina
ggcaagaugcuggcauagcug

SEQ ID NO: 788 - RNA, 21 nt, Gorilla gorilla
ggcaagaugcuggcauagcug

SEQ ID NO: 789 - RNA, 21 nt, Pan paniscus
ggcaagaugcuggcauagcug

SEQ ID NO: 790 - RNA, 21 nt, Pan troglodytes
ggcaagaugcuggcauagcug

SEQ ID NO: 791 - RNA, 21 nt, Pongo pygmaeus
ggcaagaugcuggcauagcug

SEQ ID NO: 792 - RNA, 21 nt, Danio rerio
ggcaagauguuggcauagcug

SEQ ID NO: 793 - RNA, 21 nt, Rattus norvegicus
gugcauuguaguugcauugca

SEQ ID NO: 794 - RNA, 19 nt, Macaca mulatta
gugcauuguaguugcauug

SEQ ID NO: 795 - RNA, 20 nt, Macaca mulatta
gugcauugcuguugcauugc

SEQ ID NO: 796 - RNA, 19 nt, Macaca nemestrina
gugcauuguaguugcauug

SEQ ID NO: 797 - RNA, 19 nt, Gorilla gorilla
gugcauuguaguugcauug

SEQ ID NO: 798 - RNA, 19 nt, Pan paniscus
gugcauuguaguugcauug

SEQ ID NO: 799 - RNA, 19 nt, Pan troglodytes
gugcauuguaguugcauug

SEQ ID NO: 800 - RNA, 19 nt, Pongo pygmaeus
gugcauuguaguugcauug

SEQ ID NO: 801 - RNA, 20 nt, Canis familiaris
gugcauuguaguugcauugc

SEQ ID NO: 802 - RNA, 19 nt, Gallus gallus
gugcauuguaguugcauug

SEQ ID NO: 803 - RNA, 19 nt, Xenopus tropicalis
gugcauuguaguugcauug

SEQ ID NO: 804 - RNA, 19 nt, Xenopus tropicalis
gugcauuguuguugcauug

SEQ ID NO: 805 - RNA, 23 nt, Mus musculus
uuuggcacuagcacauuuuugcu

SEQ ID NO: 806 - RNA, 23 nt, Rattus norvegicus
uuuggcacuagcacauuuuugcu

SEQ ID NO: 807 - RNA, 22 nt, Saguinus labiatus
uuuggcacuagcacauuuuugc

SEQ ID NO: 808 - RNA, 22 nt, Macaca mulatta
uuuggcacuagcacauuuuugc

SEQ ID NO: 809 - RNA, 22 nt, Macaca nemestrina
uuuggcacuagcacauuuuugc

SEQ ID NO: 810 - RNA, 22 nt, Gorilla gorilla
uuuggcacuagcacauuuuugc

SEQ ID NO: 811 - RNA, 22 nt, Pan paniscus
uuuggcacuagcacauuuuugc

SEQ ID NO: 812 - RNA, 22 nt, Pan troglodytes
uuuggcacuagcacauuuuugc

SEQ ID NO: 813 - RNA, 23 nt, Monodelphis domestica
uuuggcacuagcacauuuuugcu

SEQ ID NO: 814 - RNA, 23 nt, Xenopus tropicalis
uuuggcacuagcacauuuuugcu

SEQ ID NO: 815 - RNA, 23 nt, Danio rerio
uuuggcacuagcacauuuuugcu

SEQ ID NO: 816 - RNA, 23 nt, Fugu rubripes
uuuggcacuagcacauuuuugcu

SEQ ID NO: 817 - RNA, 23 nt, Tetraodon nigroviridis
uuuggcacuagcacauuuuugcu

SEQ ID NO: 818 - RNA, 22 nt, Mus musculus
aacccguagauccgaacuugug

SEQ ID NO: 819 - RNA, 22 nt, Rattus norvegicus
aacccguagauccgaacuugug

SEQ ID NO: 820 - RNA, 22 nt, Ateles geoffroyi
aacccguagauccgaacuugug

SEQ ID NO: 821 - RNA, 22 nt, Lagothrix lagotricha
aacccguagauccgaacuugug

SEQ ID NO: 822 - RNA, 22 nt, Saguinus labiatus
aacccguagauccgaacuugug

SEQ ID NO: 823 - RNA, 22 nt, Macaca mulatta
aacccguagauccgaacuugug

SEQ ID NO: 824 - RNA, 22 nt, Gorilla gorilla
aacccguagauccgaacuugug

SEQ ID NO: 825 - RNA, 22 nt, Pan paniscus
aacccguagauccgaacuugug

SEQ ID NO: 826 - RNA, 22 nt, Pan troglodytes
aacccguagauccgaacuugug

SEQ ID NO: 827 - RNA, 22 nt, Pongo pygmaeus
aacccguagauccgaacuugug

SEQ ID NO: 828 - RNA, 21 nt, Monodelphis domestica
aacccguagauccgaacuugu

SEQ ID NO: 829 - RNA, 22 nt, Gallus gallus
aacccguagauccgaacuugug

SEQ ID NO: 830 - RNA, 22 nt, Xenopus tropicalis
aacccguagauccgaacuugug

SEQ ID NO: 831 - RNA, 22 nt, Danio rerio
aacccguagauccgaacuugug

SEQ ID NO: 832 - RNA, 22 nt, Fugu rubripes
aacccguagauccgaacuugug

SEQ ID NO: 833 - RNA, 22 nt, Tetraodon nigroviridis
aacccguagauccgaacuugug

SEQ ID NO: 834 - RNA, 23 nt, Mus musculus
caaagugcuaacagugcagguag

SEQ ID NO: 835 - RNA, 21 nt, Rattus norvegicus
uaaagugcugacagugcagau

SEQ ID NO: 836 - RNA, 24 nt, Ateles geoffroyi
aaaagugcuuacagugcagguagc

SEQ ID NO: 837 - RNA, 21 nt, Ateles geoffroyi
uaaagugcugacagugcagau

SEQ ID NO: 838 - RNA, 21 nt, Lagothrix lagotricha
uaaagugcugacagugcagau

SEQ ID NO: 839 - RNA, 24 nt, Saguinus labiatus
aaaagugcuuacagugcagguagc

SEQ ID NO: 840 - RNA, 21 nt, Saguinus labiatus
uaaagugcugacagugcagau

SEQ ID NO: 841 - RNA, 24 nt, Macaca mulatta
aaaagugcuuacagugcagguagc

SEQ ID NO: 842 - RNA, 21 nt, Macaca mulatta
uaaagugcugacagugcagau

SEQ ID NO: 843 - RNA, 24 nt, Macaca nemestrina
aaaagugcuuacagugcagguagc

SEQ ID NO: 844 - RNA, 21 nt, Macaca nemestrina
uaaagugcugacagugcagau

SEQ ID NO: 845 - RNA, 24 nt, Gorilla gorilla
aaaagugcuuacagugcagguagc

SEQ ID NO: 846 - RNA, 21 nt, Gorilla gorilla
uaaagugcugacagugcagau

SEQ ID NO: 847 - RNA, 24 nt, Pan paniscus
aaaagugcuuacagugcagguagc

SEQ ID NO: 848 - RNA, 21 nt, Pan paniscus
uaaagugcugacagugcagau

SEQ ID NO: 849 - RNA, 24 nt, Pan troglodytes
aaaagugcuuacagugcagguagc

SEQ ID NO: 850 - RNA, 21 nt, Pan troglodytes
uaaagugcugacagugcagau

SEQ ID NO: 851 - RNA, 24 nt, Pongo pygmaeus
aaaagugcuuacagugcagguagc

SEQ ID NO: 852 - RNA, 21 nt, Pongo pygmaeus
uaaagugcugacagugcagau

SEQ ID NO: 853 - RNA, 21 nt, Canis familiaris
uaaagugcugacagugcagau

SEQ ID NO: 854 - RNA, 22 nt, Gallus gallus
aaaagugcuuacagugcaggua

SEQ ID NO: 855 - RNA, 24 nt, Xenopus tropicalis
aaaagugcuuauagugcagguaga

SEQ ID NO: 856 - RNA, 22 nt, Bos taurus
aaaagugcuuacagugcaggua

SEQ ID NO: 857 - RNA, 24 nt, Sus scrofa
aaaagugcuuacagugcagguagc

SEQ ID NO: 858 - RNA, 21 nt, Rattus norvegicus
cauuauuacuuuugguacgcg

SEQ ID NO: 859 - RNA, 21 nt, Gallus gallus
cauuauuacuuuugguacgcg

SEQ ID NO: 860 - RNA, 21 nt, Xenopus tropicalis
cauuauuacuuuugguacgcg

SEQ ID NO: 861 - RNA, 21 nt, Bos taurus
cauuauuacuuuugguacgcg

SEQ ID NO: 862 - RNA, 21 nt, Danio rerio
cauuauuacuuuugguacgcg

SEQ ID NO: 863 - RNA, 22 nt, Mus musculus
ucggauccgucugagcuuggcu

SEQ ID NO: 864 - RNA, 22 nt, Rattus norvegicus
ucggauccgucugagcuuggcu

SEQ ID NO: 865 - RNA, 22 nt, Ateles geoffroyi
ucggauccgucugagcuuggcu

SEQ ID NO: 866 - RNA, 22 nt, Lagothrix lagotricha
ucggauccgucugagcuuggcu

SEQ ID NO: 867 - RNA, 22 nt, Saguinus labiatus
ucggauccgucugagcuuggcu

SEQ ID NO: 868 - RNA, 22 nt, Macaca mulatta
ucggauccgucugagcuuggcu

SEQ ID NO: 869 - RNA, 22 nt, Macaca nemestrina
ucggauccgucugagcuuggcu

SEQ ID NO: 870 - RNA, 22 nt, Pan troglodytes
ucggauccgucugagcuuggcu

SEQ ID NO: 871 - RNA, 22 nt, Pongo pygmaeus
ucggauccgucugagcuuggcu

SEQ ID NO: 872 - RNA, 22 nt, Canis familiaris
ucggauccgucugagcuuggcu

SEQ ID NO: 873 - RNA, 22 nt, Bos taurus
ucggauccgucugagcuuggcu

SEQ ID NO: 874 - RNA, 21 nt, Rattus norvegicus
ucacagugaaccggucucuuu

SEQ ID NO: 875 - RNA, 22 nt, Ateles geoffroyi
ucacagugaaccggucucuuuu

SEQ ID NO: 876 - RNA, 22 nt, Saguinus labiatus
ucacagugaaccggucucuuuu

SEQ ID NO: 877 - RNA, 22 nt, Macaca mulatta
ucacagugaaccggucucuuuu

SEQ ID NO: 878 - RNA, 21 nt, Macaca mulatta
ucacagugaaccggucucuuu

SEQ ID NO: 879 - RNA, 22 nt, Pan paniscus
ucacagugaaccggucucuuuu

SEQ ID NO: 880 - RNA, 22 nt, Pan troglodytes
ucacagugaaccggucucuuuu

SEQ ID NO: 881 - RNA, 22 nt, Pongo pygmaeus
ucacagugaaccggucucuuuu

SEQ ID NO: 882 - RNA, 21 nt, Canis familiaris
ucacagugaaccggucucuuu

SEQ ID NO: 883 - RNA, 21 nt, Monodelphis domestica
ucacagugaaccggucucuuu

SEQ ID NO: 884 - RNA, 21 nt, Gallus gallus
ucacagugaaccggucucuuu

SEQ ID NO: 885 - RNA, 22 nt, Xenopus tropicalis
ucacagugaaccggucucuuuu

SEQ ID NO: 886 - RNA, 22 nt, Bos taurus
ucacagugaaccggucucuuuu

SEQ ID NO: 887 - RNA, 22 nt, Sus scrofa
ucacagugaaccggucucuuuu

SEQ ID NO: 888 - RNA, 22 nt, Danio rerio
ucacagugaaccggucucuuuu

SEQ ID NO: 889 - RNA, 22 nt, Fugu rubripes
ucacagugaaccggucucuuuu

SEQ ID NO: 890 - RNA, 22 nt, Tetraodon nigroviridis
ucacagugaaccggucucuuuu

SEQ ID NO: 891 - RNA, 21 nt, Rattus norvegicus
cuuuuugcggucugggcuugc

SEQ ID NO: 892 - RNA, 21 nt, Canis familiaris
cuuuuugcggucugggcuugc

SEQ ID NO: 893 - RNA, 22 nt, Monodelphis domestica
cuuuuugcggucugggcuugcu

SEQ ID NO: 894 - RNA, 21 nt, Xenopus tropicalis
cuuuuugcggucugggcuugc

SEQ ID NO: 895 - RNA, 22 nt, Danio rerio
cuuuuugcggucugggcuugcu

SEQ ID NO: 896 - RNA, 22 nt, Fugu rubripes
cuuuuugcggucugggcuugcu

SEQ ID NO: 897 - RNA, 22 nt, Tetraodon nigroviridis
cuuuuugcggucugggcuugcu

SEQ ID NO: 898 - RNA, 22 nt, Ateles geoffroyi
uugguccccuucaaccagcugu

SEQ ID NO: 899 - RNA, 22 nt, Lagothrix lagotricha
uugguccccuucaaccagcugu

SEQ ID NO: 900 - RNA, 22 nt, Saguinus labiatus
uugguccccuucaaccagcugu

SEQ ID NO: 901 - RNA, 22 nt, Macaca nemestrina
uugguccccuucaaccagcugu

SEQ ID NO: 902 - RNA, 22 nt, Gorilla gorilla
uugguccccuucaaccagcugu

SEQ ID NO: 903 - RNA, 22 nt, Pan paniscus
uugguccccuucaaccagcugu

SEQ ID NO: 904 - RNA, 21 nt, Pan troglodytes
uugguccccuucaaccagcug

SEQ ID NO: 905 - RNA, 22 nt, Monodelphis domestica
uugguccccuucaaccagcugu

SEQ ID NO: 906 - RNA, 22 nt, Gallus gallus
uugguccccuucaaccagcugu

SEQ ID NO: 907 - RNA, 22 nt, Gallus gallus
uugguccccuucaaccagcugc

SEQ ID NO: 908 - RNA, 22 nt, Xenopus laevis
uugguccccuucaaccagcugu

SEQ ID NO: 909 - RNA, 22 nt, Xenopus tropicalis
uugguccccuucaaccagcugu

SEQ ID NO: 910 - RNA, 22 nt, Xenopus tropicalis
uugguccccuucaaccagccgc

SEQ ID NO: 911 - RNA, 21 nt, Gallus gallus
uugguccccuucaaccagcua

SEQ ID NO: 912 - RNA, 21 nt, Xenopus tropicalis
uugguccccuucaaccagcua

SEQ ID NO: 913 - RNA, 23 nt, Mus musculus
uauggcuuuucauuccuauguga

SEQ ID NO: 914 - RNA, 23 nt, Rattus norvegicus
uauggcuuuuuauuccuauguga

SEQ ID NO: 915 - RNA, 23 nt, Rattus norvegicus
uauggcuuuucauuccuauguga

SEQ ID NO: 916 - RNA, 23 nt, Ateles geoffroyi
uauggcuuuuuauuccuauguga

SEQ ID NO: 917 - RNA, 23 nt, Lagothrix lagotricha
uauggcuuuuuauuccuauguga

SEQ ID NO: 918 - RNA, 23 nt, Macaca mulatta
uauggcuuuuuauuccuauguga

SEQ ID NO: 919 - RNA, 23 nt, Macaca mulatta
uauggcuuuucauuccuauguga

SEQ ID NO: 920 - RNA, 23 nt, Gorilla gorilla
uauggcuuuuuauuccuauguga

SEQ ID NO: 921 - RNA, 23 nt, Pan paniscus
uauggcuuuuuauuccuauguga

SEQ ID NO: 922 - RNA, 23 nt, Pan troglodytes
uauggcuuuuuauuccuauguga

SEQ ID NO: 923 - RNA, 23 nt, Pongo pygmaeus
uauggcuuuuuauuccuauguga

SEQ ID NO: 924 - RNA, 23 nt, Monodelphis domestica
uauggcuuuuuauuccuauguga

SEQ ID NO: 925 - RNA, 22 nt, Monodelphis domestica
uauggcuuuucauuccuaugug

SEQ ID NO: 926 - RNA, 23 nt, Gallus gallus
uauggcuuuuuauuccuauguga

SEQ ID NO: 927 - RNA, 23 nt, Xenopus tropicalis
uauggcuuuuuauuccuauguga

SEQ ID NO: 928 - RNA, 23 nt, Sus scrofa
uauggcuuuuuauuccuauguga

SEQ ID NO: 929 - RNA, 23 nt, Danio rerio
uauggcuuuuuauuccuauguga

SEQ ID NO: 930 - RNA, 22 nt, Danio rerio
uauggcuuuuuauuccuaucug

SEQ ID NO: 931 - RNA, 22 nt, Danio rerio
uauggcuuucuauuccuaugug

SEQ ID NO: 932 - RNA, 22 nt, Fugu rubripes
uauggcuuucuauuccuaugug

SEQ ID NO: 933 - RNA, 22 nt, Fugu rubripes
uauggcuuuuuauuccuaucug

SEQ ID NO: 934 - RNA, 22 nt, Tetraodon nigroviridis
uauggcuuucuauuccuaugug

SEQ ID NO: 935 - RNA, 22 nt, Tetraodon nigroviridis
uauggcuuuuuauuccuaucug

SEQ ID NO: 936 - RNA, 22 nt, Mus musculus
acuccauuuguuuugaugaugg

SEQ ID NO: 937 - RNA, 23 nt, Rattus norvegicus
acuccauuuguuuugaugaugga

SEQ ID NO: 938 - RNA, 23 nt, Macaca mulatta
acuccauuuguuuugaugaugga

SEQ ID NO: 939 - RNA, 23 nt, Gorilla gorilla
acuccauuuguuuugaugaugga

SEQ ID NO: 940 - RNA, 23 nt, Pan paniscus
acuccauuuguuuugaugaugga

SEQ ID NO: 941 - RNA, 23 nt, Pan troglodytes
acuccauuuguuuugaugaugga

SEQ ID NO: 942 - RNA, 23 nt, Pongo pygmaeus
acuccauuuguuuugaugaugga

SEQ ID NO: 943 - RNA, 23 nt, Canis familiaris
acuccauuuguuuugaugaugga

SEQ ID NO: 944 - RNA, 23 nt, Ovis aries
acuccauuuguuuugaugaugga

SEQ ID NO: 945 - RNA, 23 nt, Sus scrofa
acuccauuuguuuugaugaugga

SEQ ID NO: 946 - RNA, 21 nt, Mus musculus
cauaaaguagaaagcacuacu

SEQ ID NO: 947 - RNA, 21 nt, Rattus norvegicus
cauaaaguagaaagcacuacu

SEQ ID NO: 948 - RNA, 21 nt, Macaca mulatta
cauaaaguagaaagcacuacu

SEQ ID NO: 949 - RNA, 20 nt, Xenopus tropicalis
cauaaaguagaaagcacuac

SEQ ID NO: 950 - RNA, 22 nt, Danio rerio
cauaaaguagacagcacuacua

SEQ ID NO: 951 - RNA, 21 nt, Fugu rubripes
cauaaaguagaaagcacuacu

SEQ ID NO: 952 - RNA, 22 nt, Fugu rubripes
cauaaaguagaaagcacuacua

SEQ ID NO: 953 - RNA, 21 nt, Tetraodon nigroviridis
cauaaaguagaaagcacuacu

SEQ ID NO: 954 - RNA, 22 nt, Tetraodon nigroviridis
cauaaaguagaaagcacuacua

SEQ ID NO: 955 - RNA, 22 nt, Mus musculus
ugagaacugaauuccauggguu

SEQ ID NO: 956 - RNA, 22 nt, Rattus norvegicus
ugagaacugaauuccauggguu

SEQ ID NO: 957 - RNA, 22 nt, Macaca mulatta
ugagaacugaauuccauggguu

SEQ ID NO: 958 - RNA, 22 nt, Canis familiaris
ugagaacugaauuccauggguu

SEQ ID NO: 959 - RNA, 22 nt, Gallus gallus
ugagaacugaauuccauggguu

SEQ ID NO: 960 - RNA, 23 nt, Danio rerio
ugagaacugaauuccauagaugg

SEQ ID NO: 961 - RNA, 22 nt, Mus musculus
ugagaacugaauuccauaggcu

SEQ ID NO: 962 - RNA, 24 nt, Rattus norvegicus
ugagaacugaauuccauaggcugu

SEQ ID NO: 963 - RNA, 22 nt, Canis familiaris
ugagaacugaauuccauaggcu

SEQ ID NO: 964 - RNA, 22 nt, Gallus gallus
ugagaacugaauuccauaggcg

SEQ ID NO: 965 - RNA, 22 nt, Xenopus tropicalis
ugagaacugaauuccauggacu

SEQ ID NO: 966 - RNA, 22 nt, Danio rerio
ugagaacugaauuccaagggug

SEQ ID NO: 967 - RNA, 23 nt, Mus musculus
aacauucaacgcugucggugagu

SEQ ID NO: 968 - RNA, 22 nt, Mus musculus
aacauucaaccugucggugagu

SEQ ID NO: 969 - RNA, 23 nt, Mus musculus
aacauucauuguugucggugggu

SEQ ID NO: 970 - RNA, 23 nt, Rattus norvegicus
aacauucaacgcugucggugagu

SEQ ID NO: 971 - RNA, 23 nt, Rattus norvegicus
aacauucauugcugucggugggu

SEQ ID NO: 972 - RNA, 22 nt, Rattus norvegicus
aacauucaaccugucggugagu

SEQ ID NO: 973 - RNA, 23 nt, Rattus norvegicus
aacauucauuguugucggugggu

SEQ ID NO: 974 - RNA, 23 nt, Lagothrix lagotricha
aacauucaacgcugucggugagu

SEQ ID NO: 975 - RNA, 24 nt, Lagothrix lagotricha
aacauucauugcugucgguggguu

SEQ ID NO: 976 - RNA, 23 nt, Saguinus labiatus
aacauucaacgcugucggugagu

SEQ ID NO: 977 - RNA, 23 nt, Macaca mulatta
aacauucaacgcugucggugagu

SEQ ID NO: 978 - RNA, 24 nt, Macaca mulatta
aacauucauugcugucgguggguu

SEQ ID NO: 979 - RNA, 22 nt, Macaca mulatta
aacauucaaccugucggugagu

SEQ ID NO: 980 - RNA, 23 nt, Macaca mulatta
aacauucauuguugucggugggu

SEQ ID NO: 981 - RNA, 23 nt, Macaca nemestrina
aacauucaacgcugucggugagu

SEQ ID NO: 982 - RNA, 24 nt, Macaca nemestrina
aacauucauugcugucgguggguu

SEQ ID NO: 983 - RNA, 23 nt, Gorilla gorilla
aacauucaacgcugucggugagu

SEQ ID NO: 984 - RNA, 24 nt, Gorilla gorilla
aacauucauugcugucgguggguu

SEQ ID NO: 985 - RNA, 22 nt, Gorilla gorilla
aacauucaaccugucggugagu

SEQ ID NO: 986 - RNA, 23 nt, Pan paniscus
aacauucaacgcugucggugagu

SEQ ID NO: 987 - RNA, 24 nt, Pan paniscus
aacauucauugcugucgguggguu

SEQ ID NO: 988 - RNA, 22 nt, Pan paniscus
aacauucaaccugucggugagu

SEQ ID NO: 989 - RNA, 23 nt, Pan troglodytes
aacauucaacgcugucggugagu

SEQ ID NO: 990 - RNA, 24 nt, Pan troglodytes
aacauucauugcugucgguggguu

SEQ ID NO: 991 - RNA, 22 nt, Pan troglodytes
aacauucaaccugucggugagu

SEQ ID NO: 992 - RNA, 23 nt, Pongo pygmaeus
aacauucaacgcugucggugagu

SEQ ID NO: 993 - RNA, 24 nt, Pongo pygmaeus
aacauucauugcugucgguggguu

SEQ ID NO: 994 - RNA, 22 nt, Canis familiaris
aacauucaacgcugucggugag

SEQ ID NO: 995 - RNA, 20 nt, Canis familiaris
aacauucauugcugucggug

SEQ ID NO: 996 - RNA, 23 nt, Canis familiaris
aacauucaaccugucggugaguu

SEQ ID NO: 997 - RNA, 23 nt, Canis familiaris
aacauucauuguugucggugggu

SEQ ID NO: 998 - RNA, 23 nt, Monodelphis domestica
aacauucaacgcugucggugagu

SEQ ID NO: 999 - RNA, 22 nt, Monodelphis domestica
aacauucauugcugucgguggg

SEQ ID NO: 1000 - RNA, 23 nt, Monodelphis domestica
aacauucaacgcugucggugagu

SEQ ID NO: 1001 - RNA, 23 nt, Gallus gallus
aacauucaacgcugucggugagu

SEQ ID NO: 1002 - RNA, 22 nt, Gallus gallus
aacauucauugcugucgguggg

SEQ ID NO: 1003 - RNA, 23 nt, Xenopus tropicalis
aacauucaacgcugucggugagu

SEQ ID NO: 1004 - RNA, 22 nt, Xenopus tropicalis
aacauucauugcugucgguggg

SEQ ID NO: 1005 - RNA, 24 nt, Bos taurus
aacauucaacgcugucggugaguu

SEQ ID NO: 1006 - RNA, 25 nt, Bos taurus
aacauucauugcugucgguggguuu

SEQ ID NO: 1007 - RNA, 24 nt, Bos taurus
aacauucaaccugucggugaguuu

SEQ ID NO: 1008 - RNA, 24 nt, Sus scrofa
aacauucauugcugucgguggguu

SEQ ID NO: 1009 - RNA, 22 nt, Sus scrofa
aacauucaaccugucggugagu

SEQ ID NO: 1010 - RNA, 23 nt, Danio rerio
aacauucaacgcugucggugagu

SEQ ID NO: 1011 - RNA, 22 nt, Danio rerio
aacauucauugcugucgguggg

SEQ ID NO: 1012 - RNA, 22 nt, Danio rerio
cacauucauugcugucgguggg

SEQ ID NO: 1013 - RNA, 23 nt, Fugu rubripes
aacauucaacgcugucggugagu

SEQ ID NO: 1014 - RNA, 22 nt, Fugu rubripes
aacauucauugcugucgguggg

SEQ ID NO: 1015 - RNA, 23 nt, Tetraodon nigroviridis
aacauucaacgcugucggugagu

SEQ ID NO: 1016 - RNA, 22 nt, Tetraodon nigroviridis
aacauucauugcugucgguggg

SEQ ID NO: 1017 - RNA, 21 nt, Xenopus tropicalis
ugguucuagacuugccaacua

SEQ ID NO: 1018 - RNA, 21 nt, Danio rerio
ugguucuagacuugccaacua

SEQ ID NO: 1019 - RNA, 22 nt, Mus musculus
uauggcacugguagaauucacu

SEQ ID NO: 1020 - RNA, 22 nt, Rattus norvegicus
uauggcacugguagaauucacu

SEQ ID NO: 1021 - RNA, 23 nt, Saguinus labiatus
uauggcacugguagaauucacug

SEQ ID NO: 1022 - RNA, 23 nt, Macaca mulatta
uauggcacugguagaauucacug

SEQ ID NO: 1023 - RNA, 23 nt, Macaca nemestrina
uauggcacugguagaauucacug

SEQ ID NO: 1024 - RNA, 23 nt, Gorilla gorilla
uauggcacugguagaauucacug

SEQ ID NO: 1025 - RNA, 23 nt, Pan paniscus
uauggcacugguagaauucacug

SEQ ID NO: 1026 - RNA, 23 nt, Pan troglodytes
uauggcacugguagaauucacug

SEQ ID NO: 1027 - RNA, 22 nt, Canis familiaris
uauggcacugguagaauucacu

SEQ ID NO: 1028 - RNA, 23 nt, Monodelphis domestica
uauggcacugguagaauucacug

SEQ ID NO: 1029 - RNA, 23 nt, Gallus gallus
uauggcacugguagaauucacug

SEQ ID NO: 1030 - RNA, 23 nt, Xenopus tropicalis
uauggcacugguagaauucacug

SEQ ID NO: 1031 - RNA, 23 nt, Sus scrofa
uauggcacugguagaauucacug

SEQ ID NO: 1032 - RNA, 23 nt, Danio rerio
uauggcacugguagaauucacug

SEQ ID NO: 1033 - RNA, 23 nt, Fugu rubripes
uauggcacugguagaauucacug

SEQ ID NO: 1034 - RNA, 23 nt, Tetraodon nigroviridis
uauggcacugguagaauucacug

SEQ ID NO: 1035 - RNA, 22 nt, Mus musculus
ucgugucuuguguugcagccgg

SEQ ID NO: 1036 - RNA, 22 nt, Rattus norvegicus
ucgugucuuguguugcagccgg

SEQ ID NO: 1037 - RNA, 22 nt, Macaca mulatta
ucgugucuuguguugcagccgg

SEQ ID NO: 1038 - RNA, 21 nt, Macaca nemestrina
ucgugucuuguguugcagccg

SEQ ID NO: 1039 - RNA, 21 nt, Gorilla gorilla
ucgugucuuguguugcagccg

SEQ ID NO: 1040 - RNA, 21 nt, Pan paniscus
ucgugucuuguguugcagccg

SEQ ID NO: 1041 - RNA, 21 nt, Pongo pygmaeus
ucgugucuuguguugcagccg

SEQ ID NO: 1042 - RNA, 20 nt, Monodelphis domestica
ucgugucuuguguugcagcc

SEQ ID NO: 1043 - RNA, 20 nt, Gallus gallus
ucgugucuuguguugcagcc

SEQ ID NO: 1044 - RNA, 21 nt, Xenopus tropicalis
ucgugucuuguguugcagcca

SEQ ID NO: 1045 - RNA, 20 nt, Danio rerio
ucgugucuuguguugcagcc

SEQ ID NO: 1046 - RNA, 20 nt, Fugu rubripes
ucgugucuuguguugcagcc

SEQ ID NO: 1047 - RNA, 20 nt, Tetraodon nigroviridis
ucgugucuuguguugcagcc

SEQ ID NO: 1048 - RNA, 21 nt, Mus musculus
cugaccuaugaauugacagcc

SEQ ID NO: 1049 - RNA, 21 nt, Rattus norvegicus
cugaccuaugaauugacagcc

SEQ ID NO: 1050 - RNA, 21 nt, Macaca mulatta
cugaccuaugaauugacagcc

SEQ ID NO: 1051 - RNA, 21 nt, Canis familiaris
cugaccuaugaauugacagcc

SEQ ID NO: 1052 - RNA, 21 nt, Xenopus tropicalis
augaccuaugaauugacagcc

SEQ ID NO: 1053 - RNA, 23 nt, Bos taurus
cugaccuaugaauugacagccag

SEQ ID NO: 1054 - RNA, 21 nt, Danio rerio
augaccuaugaauugacagcc

SEQ ID NO: 1055 - RNA, 21 nt, Fugu rubripes
augaccuaugaauugacagcc

SEQ ID NO: 1056 - RNA, 21 nt, Tetraodon nigroviridis
augaccuaugaauugacagcc

SEQ ID NO: 1057 - RNA, 21 nt, Mus musculus
augaccuaugauuugacagac

SEQ ID NO: 1058 - RNA, 21 nt, Rattus norvegicus
augaccuaugauuugacagac

SEQ ID NO: 1059 - RNA, 21 nt, Macaca mulatta
augaccuaugaauugacagac

SEQ ID NO: 1060 - RNA, 21 nt, Macaca nemestrina
augaccuaugaauugacagac

SEQ ID NO: 1061 - RNA, 21 nt, Gorilla gorilla
augaccuaugaauugacagac

SEQ ID NO: 1062 - RNA, 21 nt, Pan troglodytes
augaccuaugaauugacagac

SEQ ID NO: 1063 - RNA, 21 nt, Pongo pygmaeus
augaccuaugaauugacagac

SEQ ID NO: 1064 - RNA, 21 nt, Gallus gallus
augaccuaugaauugacagac

SEQ ID NO: 1065 - RNA, 21 nt, Xenopus tropicalis
augaccuaugaaaugacagcc

SEQ ID NO: 1066 - RNA, 22 nt, Bos taurus
augaccuaugaauugacagaca

SEQ ID NO: 1067 - RNA, 22 nt, Mus musculus
caucuuaccggacagugcugga

SEQ ID NO: 1068 - RNA, 22 nt, Monodelphis domestica
caucuuacuagacagugcugga

SEQ ID NO: 1069 - RNA, 22 nt, Rattus norvegicus
uaaucucagcuggcaacuguga

SEQ ID NO: 1070 - RNA, 22 nt, Macaca mulatta
uaaucucagcuggcaacuguga

SEQ ID NO: 1071 - RNA, 21 nt, Gorilla gorilla
uaaucucagcuggcaacugug

SEQ ID NO: 1072 - RNA, 21 nt, Pan paniscus
uaaucucagcuggcaacugug

SEQ ID NO: 1073 - RNA, 21 nt, Pongo pygmaeus
uaaucucagcuggcaacugug

SEQ ID NO: 1074 - RNA, 21 nt, Lemur catta
uaaucucagcuggcaacugug

SEQ ID NO: 1075 - RNA, 21 nt, Monodelphis domestica
uaaucucagcuggcaacugug

SEQ ID NO: 1076 - RNA, 21 nt, Gallus gallus
uaaucucagcuggcaacugug

SEQ ID NO: 1077 - RNA, 21 nt, Xenopus tropicalis
uaaucucagcuggcaacugug

SEQ ID NO: 1078 - RNA, 21 nt, Sus scrofa
uaaucucagcuggcaacugug

SEQ ID NO: 1079 - RNA, 22 nt, Danio rerio
uaaucucagcuggcaacuguga

SEQ ID NO: 1080 - RNA, 22 nt, Fugu rubripes
aaaucucagcuggcaacuguga

SEQ ID NO: 1081 - RNA, 22 nt, Tetraodon nigroviridis
aaaucucagcuggcaacuguga

SEQ ID NO: 1082 - RNA, 23 nt, Mus musculus
uacugcaucaggaacugacugga

SEQ ID NO: 1083 - RNA, 24 nt, Rattus norvegicus
uacugcaucaggaacugacuggau

SEQ ID NO: 1084 - RNA, 24 nt, Gorilla gorilla
uacugcaucaggaacugauuggau

SEQ ID NO: 1085 - RNA, 24 nt, Pan paniscus
uacugcaucaggaacugauuggau

SEQ ID NO: 1086 - RNA, 24 nt, Monodelphis domestica
uacugcaucaggaacugauuggau

SEQ ID NO: 1087 - RNA, 24 nt, Gallus gallus
uacugcaucaggaacugauuggau

SEQ ID NO: 1088 - RNA, 24 nt, Xenopus tropicalis
uacugcaucaggaacugauuggau

SEQ ID NO: 1089 - RNA, 24 nt, Sus scrofa
uacugcaucaggaacugauuggau

SEQ ID NO: 1090 - RNA, 22 nt, Danio rerio
uacugcaucaggaacugauugg

SEQ ID NO: 1091 - RNA, 22 nt, Fugu rubripes
uacugcaucaggaacugauugg

SEQ ID NO: 1092 - RNA, 22 nt, Tetraodon nigroviridis
uacugcaucaggaacugauugg

SEQ ID NO: 1093 - RNA, 21 nt, Gorilla gorilla
ccacaccgugucugacacuuu

SEQ ID NO: 1094 - RNA, 21 nt, Pan paniscus
ccacaccguaucugacacuuu

SEQ ID NO: 1095 - RNA, 21 nt, Pan troglodytes
ccacaccguaucugacacuuu

SEQ ID NO: 1096 - RNA, 21 nt, Mus musculus
agcuacaucuggcuacugggu

SEQ ID NO: 1097 - RNA, 21 nt, Rattus norvegicus
agcuacaucuggcuacugggu

SEQ ID NO: 1098 - RNA, 24 nt, Ateles geoffroyi
agcuacaucuggcuacugggucuc

SEQ ID NO: 1099 - RNA, 21 nt, Macaca mulatta
agcuacaucuggcuacugggu

SEQ ID NO: 1100 - RNA, 24 nt, Gallus gallus
agcuacaucuggcuacugggucuc

SEQ ID NO: 1101 - RNA, 24 nt, Xenopus tropicalis
agcuacaucuggcuacugggucuc

SEQ ID NO: 1102 - RNA, 21 nt, Bos taurus
agcuacaucuggcuacugggu

SEQ ID NO: 1103 - RNA, 24 nt, Danio rerio
agcuacaucuggcuacugggucuc

SEQ ID NO: 1104 - RNA, 24 nt, Fugu rubripes
agcuacaucuggcuacugggucuc

SEQ ID NO: 1105 - RNA, 24 nt, Tetraodon nigroviridis
agcuacaucuggcuacugggucuc

SEQ ID NO: 1106 - RNA, 22 nt, Mus musculus
ugucaguuugucaaauacccca

SEQ ID NO: 1107 - RNA, 21 nt, Rattus norvegicus
ugucaguuugucaaauacccc

SEQ ID NO: 1108 - RNA, 21 nt, Saguinus labiatus
ugucaguuugucaaauacccc

SEQ ID NO: 1109 - RNA, 21 nt, Macaca mulatta
ugucaguuugucaaauacccc

SEQ ID NO: 1110 - RNA, 21 nt, Gorilla gorilla
ugucaguuugucaaauacccc

SEQ ID NO: 1111 - RNA, 21 nt, Pan paniscus
ugucaguuugucaaauacccc

SEQ ID NO: 1112 - RNA, 21 nt, Pan troglodytes
ugucaguuugucaaauacccc

SEQ ID NO: 1113 - RNA, 21 nt, Pongo pygmaeus
ugucaguuugucaaauacccc

SEQ ID NO: 1114 - RNA, 21 nt, Monodelphis domestica
ugucaguuugucaaauacccc

SEQ ID NO: 1115 - RNA, 21 nt, Gallus gallus
ugucaguuugucaaauacccc

SEQ ID NO: 1116 - RNA, 21 nt, Xenopus tropicalis
ugucaguuugucaaauacccc

SEQ ID NO: 1117 - RNA, 21 nt, Danio rerio
ugucaguuugucaaauacccc

SEQ ID NO: 1118 - RNA, 21 nt, Fugu rubripes
ugucaguuugucaaauacccc

SEQ ID NO: 1119 - RNA, 21 nt, Tetraodon nigroviridis
ugucaguuugucaaauacccc

SEQ ID NO: 1120 - RNA, 21 nt, Mus musculus
uaagucacuagugguuccguu

SEQ ID NO: 1121 - RNA, 23 nt, Rattus norvegicus
caagucacuagugguuccguuua

SEQ ID NO: 1122 - RNA, 23 nt, Macaca mulatta
caagucacuagugguuccguuua

SEQ ID NO: 1123 - RNA, 23 nt, Macaca nemestrina
caagucacuagugguuccguuua

SEQ ID NO: 1124 - RNA, 23 nt, Gorilla gorilla
caagucacuagugguuccguuua

SEQ ID NO: 1125 - RNA, 23 nt, Pan paniscus
caagucacuagugguuccguuua

SEQ ID NO: 1126 - RNA, 23 nt, Pan troglodytes
caagucacuagugguuccguuua

SEQ ID NO: 1127 - RNA, 23 nt, Pongo pygmaeus
caagucacuagugguuccguuua

SEQ ID NO: 1128 - RNA, 22 nt, Canis familiaris
caagucacuagugguuccguuu

SEQ ID NO: 1129 - RNA, 23 nt, Sus scrofa
caagucacuagugguuccguuua

SEQ ID NO: 1130 - RNA, 23 nt, Mus musculus
acuuuaacaugggaaugcuuucu

SEQ ID NO: 1131 - RNA, 23 nt, Gallus gallus
acuuuaacauggaggugcuuucu

SEQ ID NO: 1132 - RNA, 22 nt, Gallus gallus
uuuaacauggagguaccugcug

SEQ ID NO: 1133 - RNA, 22 nt, Mus musculus
auauaauacaaccugcuaagug

SEQ ID NO: 1134 - RNA, 22 nt, Rattus norvegicus
auauaauacaaccugcuaagug

SEQ ID NO: 1135 - RNA, 22 nt, Macaca mulatta
uuauaauacaaccugauaagug

SEQ ID NO: 1136 - RNA, 22 nt, Macaca mulatta
auauaauacaaccugcuaagug

SEQ ID NO: 1137 - RNA, 22 nt, Canis familiaris
auauaauacaaccugcuaagug

SEQ ID NO: 1138 - RNA, 22 nt, Bos taurus
uuauaauacaaccugauaagug

SEQ ID NO: 1139 - RNA, 21 nt, Rattus norvegicus
aucauagaggaacauccacuu

SEQ ID NO: 1140 - RNA, 21 nt, Macaca mulatta
aucauagaggaaaauccacgu

SEQ ID NO: 1141 - RNA, 22 nt, Macaca mulatta
aucauagaggaaaauccauguu

SEQ ID NO: 1142 - RNA, 21 nt, Canis familiaris
aucauagaggaaaauccacgu

SEQ ID NO: 1143 - RNA, 23 nt, Mus musculus
agguuacccgagcaacuuugcau

SEQ ID NO: 1144 - RNA, 20 nt, Rattus norvegicus
agguuacccgagcaacuuug

SEQ ID NO: 1145 - RNA, 23 nt, Macaca mulatta
agguuacccgagcaacuuugcau

SEQ ID NO: 1146 - RNA, 22 nt, Mus musculus
uaauacugucugguaaugccgu

SEQ ID NO: 1147 - RNA, 22 nt, Rattus norvegicus
uaauacugucugguaaugccgu

SEQ ID NO: 1148 - RNA, 22 nt, Macaca mulatta
uaauacugucugguaaaaccgu

SEQ ID NO: 1149 - RNA, 22 nt, Canis familiaris
uaauacugucugguaaugccgu

SEQ ID NO: 1150 - RNA, 22 nt, Gallus gallus
uaauacugucugguaaugccgu

SEQ ID NO: 1151 - RNA, 21 nt, Xenopus laevis
uaauacugucugguaaugccg

SEQ ID NO: 1152 - RNA, 22 nt, Xenopus tropicalis
uaauacugucugguaaugccgu

SEQ ID NO: 1153 - RNA, 22 nt, Danio rerio
uaauacugucugguaaugccgu

SEQ ID NO: 1154 - RNA, 22 nt, Fugu rubripes
uaauacugucugguaaugccgu

SEQ ID NO: 1155 - RNA, 22 nt, Tetraodon nigroviridis
uaauacugucugguaaugccgu

SEQ ID NO: 1156 - RNA, 23 nt, Mus musculus
uaauacugccggguaaugaugga

SEQ ID NO: 1157 - RNA, 23 nt, Rattus norvegicus
uaauacugccugguaaugaugac

SEQ ID NO: 1158 - RNA, 22 nt, Rattus norvegicus
uaauacugccggguaaugaugg

SEQ ID NO: 1159 - RNA, 23 nt, Canis familiaris
uaauacugccggguaaugaugga

SEQ ID NO: 1160 - RNA, 22 nt, Monodelphis domestica
uaauacugccugguaaugauga

SEQ ID NO: 1161 - RNA, 22 nt, Monodelphis domestica
uaauacugccggguaaugaugg

SEQ ID NO: 1162 - RNA, 23 nt, Gallus gallus
uaauacugccugguaaugaugau

SEQ ID NO: 1163 - RNA, 23 nt, Xenopus tropicalis
uaauacugccugguaaugaugau

SEQ ID NO: 1164 - RNA, 21 nt, Bos taurus
uaauacugccugguaaugaug

SEQ ID NO: 1165 - RNA, 23 nt, Bos taurus
uaauacugccggguaaugaugga

SEQ ID NO: 1166 - RNA, 22 nt, Danio rerio
uaauacugccugguaaugauga

SEQ ID NO: 1167 - RNA, 22 nt, Danio rerio
uaauacugccugguaaugaugc

SEQ ID NO: 1168 - RNA, 22 nt, Fugu rubripes
uaauacugccugguaaugauga

SEQ ID NO: 1169 - RNA, 22 nt, Tetraodon nigroviridis
uaauacugccugguaaugauga

SEQ ID NO: 1170 - RNA, 22 nt, Mus musculus
uugcauauguaggaugucccau

SEQ ID NO: 1171 - RNA, 22 nt, Rattus norvegicus
uugcauauguaggaugucccau

SEQ ID NO: 1172 - RNA, 22 nt, Macaca mulatta
uugcauauguaggaugucccau

SEQ ID NO: 1173 - RNA, 22 nt, Canis familiaris
uugcauauguaggaugucccau

SEQ ID NO: 1174 - RNA, 22 nt, Canis familiaris
uuuuugcgauguguuccuaaua

SEQ ID NO: 1175 - RNA, 22 nt, Mus musculus
aaaccguuaccauuacugaguu

SEQ ID NO: 1176 - RNA, 22 nt, Rattus norvegicus
aaaccguuaccauuacugaguu

SEQ ID NO: 1177 - RNA, 22 nt, Macaca mulatta
aaaccguuaccauuacugaguu

SEQ ID NO: 1178 - RNA, 22 nt, Monodelphis domestica
aaaccguuaccauuacuguguu

SEQ ID NO: 1179 - RNA, 23 nt, Gallus gallus
aaaccguuaccauuacugaguuu

SEQ ID NO: 1180 - RNA, 22 nt, Xenopus tropicalis
aaaccguuaccauuacugaguu

SEQ ID NO: 1181 - RNA, 22 nt, Danio rerio
aaaccguuaccauuacugaguu

SEQ ID NO: 1182 - RNA, 22 nt, Mus musculus
uguuugcagaggaaacugagac

SEQ ID NO: 1183 - RNA, 22 nt, Mus musculus
aaucguacagggucauccacuu

SEQ ID NO: 1184 - RNA, 21 nt, Rattus norvegicus
aaucguacagggucauccacu

SEQ ID NO: 1185 - RNA, 22 nt, Macaca mulatta
aaucguacagggucauccacuu

SEQ ID NO: 1186 - RNA, 22 nt, Bos taurus
aaucguacagggucauccacuu

SEQ ID NO: 1187 - RNA, 23 nt, Gallus gallus
agugacaucauauguacggcugc

SEQ ID NO: 1188 - RNA, 23 nt, Xenopus tropicalis
agugacaucauauguacggcugc

SEQ ID NO: 1189 - RNA, 23 nt, Danio rerio
agugacaucauauguacggcugc

SEQ ID NO: 1190 - RNA, 23 nt, Fugu rubripes
agugacaucauauguacggcugc

SEQ ID NO: 1191 - RNA, 23 nt, Tetraodon nigroviridis
agugacaucauauguacggcugc

SEQ ID NO: 1192 - RNA, 20 nt, Ateles geoffroyi
auugacacuuuugugaguag

SEQ ID NO: 1193 - RNA, 21 nt, Macaca mulatta
auugacacuucugugaguaga

SEQ ID NO: 1194 - RNA, 20 nt, Pygathrix bieti
auugacacuucugugaguag

SEQ ID NO: 1195 - RNA, 20 nt, Pan troglodytes
auugacacuucugugaguag

SEQ ID NO: 1196 - RNA, 20 nt, Symphalangus syndactylus
auugacacuucugugaguag

SEQ ID NO: 1197 - RNA, 23 nt, Macaca mulatta
caaagcgcuucucuuuagagagu

SEQ ID NO: 1198 - RNA, 21 nt, Macaca mulatta
caaagcgcuucucuuuagaga

SEQ ID NO: 1199 - RNA, 22 nt, Mus musculus
ugugacagauugauaacugaaa

SEQ ID NO: 1200 - RNA, 22 nt, Rattus norvegicus
ugugacagauugauaacugaaa

SEQ ID NO: 1201 - RNA, 22 nt, Macaca mulatta
ugugacagauugauaacugaaa

SEQ ID NO: 1202 - RNA, 22 nt, Mus musculus
auucugcauuuuuagcaagcuc

SEQ ID NO: 1203 - RNA, 22 nt, Macaca mulatta
auucugcauuuuuagcaaguuc

SEQ ID NO: 1204 - RNA, 22 nt, Macaca mulatta
uggucuaggauuguuggaggag

SEQ ID NO: 1205 - RNA, 20 nt, Macaca mulatta
aggguguugcucucaucucu

SEQ ID NO: 1206 - RNA, 19 nt, Macaca mulatta
gugucugcuuccuguggga

SEQ ID NO: 1207 - RNA, 19 nt, Macaca mulatta
aguguggcuugcuuagagc

SEQ ID NO: 1208 - RNA, 22 nt, Mus musculus
uaaugccccuaaaaauccuuau

SEQ ID NO: 1209 - RNA, 22 nt, Rattus norvegicus
uaaugccccuaaaaauccuuau

SEQ ID NO: 1210 - RNA, 22 nt, Macaca mulatta
uaaugccccuaaaaauccuuau

SEQ ID NO: 1211 - RNA, 22 nt, Canis familiaris
uaaugccccuaaaaauccuuau

SEQ ID NO: 1212 - RNA, 22 nt, Monodelphis domestica
uaaugccccuaaaaauccuuau

SEQ ID NO: 1213 - RNA, 22 nt, Gallus gallus
uaaugccccuaaaaauccuuau

SEQ ID NO: 1214 - RNA, 22 nt, Xenopus tropicalis
uaaugccccuaaaaauccuuau

SEQ ID NO: 1215 - RNA, 22 nt, Bos taurus
uaaugccccuaaaaauccuuau

SEQ ID NO: 1216 - RNA, 22 nt, Danio rerio
uaaugccccuaaaaauccuuau

SEQ ID NO: 1217 - RNA, 22 nt, Fugu rubripes
uaaugccccuaaaaauccuuau

SEQ ID NO: 1218 - RNA, 22 nt, Tetraodon nigroviridis
uaaugccccuaaaaauccuuau

SEQ ID NO: 1219 - RNA, 23 nt, Mus musculus
uguaguguuuccuacuuuaugga

SEQ ID NO: 1220 - RNA, 23 nt, Rattus norvegicus
uguaguguuuccuacuuuaugga

SEQ ID NO: 1221 - RNA, 23 nt, Macaca mulatta
uguaguguuuccuacuuuaugga

SEQ ID NO: 1222 - RNA, 22 nt, Gallus gallus
uguaguguuuccuacuuuaugg

SEQ ID NO: 1223 - RNA, 23 nt, Xenopus tropicalis
uguaguguuuccuacuuuaugga

SEQ ID NO: 1224 - RNA, 22 nt, Mus musculus
uaacacugucugguaacgaugu

SEQ ID NO: 1225 - RNA, 22 nt, Rattus norvegicus
uaacacugucugguaacgaugu

SEQ ID NO: 1226 - RNA, 22 nt, Macaca mulatta
uaacacugucugguaacgaugu

SEQ ID NO: 1227 - RNA, 22 nt, Monodelphis domestica
uaacacugucugguaacgaugu

SEQ ID NO: 1228 - RNA, 22 nt, Gallus gallus
uaacacugucugguaacgaugu

SEQ ID NO: 1229 - RNA, 22 nt, Xenopus tropicalis
uaacacugucugguaacgaugu

SEQ ID NO: 1230 - RNA, 23 nt, Bos taurus
uaacacugucugguaacgauguu

SEQ ID NO: 1231 - RNA, 22 nt, Danio rerio
uaacacugucugguaacgaugu

SEQ ID NO: 1232 - RNA, 22 nt, Fugu rubripes
uaacacugucugguaacgaugu

SEQ ID NO: 1233 - RNA, 22 nt, Tetraodon nigroviridis
uaacacugucugguaacgaugu

SEQ ID NO: 1234 - RNA, 22 nt, Mus musculus
uuaucagaaucuccagggguac

SEQ ID NO: 1235 - RNA, 22 nt, Rattus norvegicus
uuaucagaaucuccagggguac

SEQ ID NO: 1236 - RNA, 22 nt, Canis familiaris
uuaucagaaucuccagggguac

SEQ ID NO: 1237 - RNA, 22 nt, Bos taurus
uuaucagaaucuccagggguac

SEQ ID NO: 1238 - RNA, 22 nt, Homo sapiens
uagcagcacauaaugguuugug

SEQ ID NO: 1239 - RNA, 22 nt, Homo sapiens
uagcagcacaucaugguuuaca

SEQ ID NO: 1240 - RNA, 22 nt, Homo sapiens
cagcagcaauucauguuuugaa

SEQ ID NO: 1241 - RNA, 21 nt, Homo sapiens
cagcagcacacugugguuugu

SEQ ID NO: 1242 - RNA, 22 nt, Mus musculus
uagcagcacauaaugguuugug

SEQ ID NO: 1243 - RNA, 22 nt, Mus musculus
uagcagcacaucaugguuuaca

SEQ ID NO: 1244 - RNA, 22 nt, Mus musculus
cagcagcaauucauguuuugga

SEQ ID NO: 1245 - RNA, 22 nt, Mus musculus
cagcagcacacugugguuugua

SEQ ID NO: 1246 - RNA, 22 nt, Rattus norvegicus
uagcagcacaucaugguuuaca

SEQ ID NO: 1247 - RNA, 22 nt, Rattus norvegicus
cagcagcaauucauguuuugga

SEQ ID NO: 1248 - RNA, 22 nt, Rattus norvegicus
cagcagcacacugugguuugua

SEQ ID NO: 1249 - RNA, 22 nt, Ateles geoffroyi
uagcagcacauaaugguuugug

SEQ ID NO: 1250 - RNA, 22 nt, Ateles geoffroyi
uagcagcacaucaugguuuaca

SEQ ID NO: 1251 - RNA, 22 nt, Lagothrix lagotricha
uagcagcacauaaugguuugug

SEQ ID NO: 1252 - RNA, 22 nt, Lagothrix lagotricha
uagcagcacaucaugguuuaca

SEQ ID NO: 1253 - RNA, 22 nt, Saguinus labiatus
uagcagcacauaaugguuugug

SEQ ID NO: 1254 - RNA, 22 nt, Macaca mulatta
uagcagcacauaaugguuugug

SEQ ID NO: 1255 - RNA, 22 nt, Macaca mulatta
uagcagcacaucaugguuuaca

SEQ ID NO: 1256 - RNA, 22 nt, Macaca mulatta
cagcagcaauucauguuuugaa

SEQ ID NO: 1257 - RNA, 21 nt, Macaca mulatta
cagcagcacacugugguuugu

SEQ ID NO: 1258 - RNA, 22 nt, Macaca nemestrina
uagcagcacauaaugguuugug

SEQ ID NO: 1259 - RNA, 22 nt, Macaca nemestrina
uagcagcacaucaugguuuaca

SEQ ID NO: 1260 - RNA, 22 nt, Gorilla gorilla
uagcagcacauaaugguuugug

SEQ ID NO: 1261 - RNA, 22 nt, Gorilla gorilla
uagcagcacaucaugguuuaca

SEQ ID NO: 1262 - RNA, 22 nt, Pan paniscus
uagcagcacauaaugguuugug

SEQ ID NO: 1263 - RNA, 22 nt, Pan paniscus
uagcagcacaucaugguuuaca

SEQ ID NO: 1264 - RNA, 22 nt, Pan troglodytes
uagcagcacauaaugguuugug

SEQ ID NO: 1265 - RNA, 22 nt, Pan troglodytes
uagcagcacaucaugguuuaca

SEQ ID NO: 1266 - RNA, 22 nt, Pongo pygmaeus
uagcagcacauaaugguuugug

SEQ ID NO: 1267 - RNA, 22 nt, Pongo pygmaeus
uagcagcacaucaugguuuaca

SEQ ID NO: 1268 - RNA, 22 nt, Lemur catta
uagcagcacauaaugguuugug

SEQ ID NO: 1269 - RNA, 21 nt, Canis familiaris
uagcagcacauaaugguuugu

SEQ ID NO: 1270 - RNA, 20 nt, Canis familiaris
uagcagcacaucaugguuua

SEQ ID NO: 1271 - RNA, 21 nt, Canis familiaris
cagcagcacacugugguuugu

SEQ ID NO: 1272 - RNA, 22 nt, Monodelphis domestica
uagcagcacauaaugguuuguu

SEQ ID NO: 1273 - RNA, 21 nt, Gallus gallus
uagcagcacauaaugguuugu

SEQ ID NO: 1274 - RNA, 22 nt, Gallus gallus
uagcagcacaucaugguuugca

SEQ ID NO: 1275 - RNA, 22 nt, Xenopus tropicalis
uagcagcacauaaugguuugug

SEQ ID NO: 1276 - RNA, 22 nt, Xenopus tropicalis
uagcagcacaucaugauuugca

SEQ ID NO: 1277 - RNA, 22 nt, Xenopus tropicalis
uagcagcacaucaugguuugua

SEQ ID NO: 1278 - RNA, 21 nt, Bos taurus
uagcagcacauaaugguuugu

SEQ ID NO: 1279 - RNA, 22 nt, Bos taurus
uagcagcacaucaugguuuaca

SEQ ID NO: 1280 - RNA, 22 nt, Bos taurus
cagcagcacacugugguuugua

SEQ ID NO: 1281 - RNA, 22 nt, Danio rerio
uagcagcacagaaugguuugug

SEQ ID NO: 1282 - RNA, 22 nt, Danio rerio
uagcagcacaucaugguuugua

SEQ ID NO: 1283 - RNA, 22 nt, Danio rerio
aagcagcacaucaauauuggca

SEQ ID NO: 1284 - RNA, 22 nt, Danio rerio
aagcagcacauaaauacuggag

SEQ ID NO: 1285 - RNA, 22 nt, Fugu rubripes
uagcagcacggaaugguuugug

SEQ ID NO: 1286 - RNA, 22 nt, Tetraodon nigroviridis
uagcagcacggaaugguuugug

SEQ ID NO: 1287 - RNA, 22 nt, Mus musculus
acugcagugugagcacuucuag

SEQ ID NO: 1288 - RNA, 22 nt, Rattus norvegicus
acugcagugugagcacuucugg

SEQ ID NO: 1289 - RNA, 22 nt, Danio rerio
acugcagugugagcacuugaag

SEQ ID NO: 1290 - RNA, 22 nt, Homo sapiens
gagcuuauucauaaaagugcag

SEQ ID NO: 1291 - RNA, 22 nt, Mus musculus
gagcuuauucauaaaagugcag

SEQ ID NO: 1292 - RNA, 22 nt, Macaca mulatta
gagcuuauucauaaaagugcag

SEQ ID NO: 1293 - RNA, 22 nt, Homo sapiens
uauugcacuugucccggccugu

SEQ ID NO: 1294 - RNA, 22 nt, Homo sapiens
uauugcacucgucccggccucc

SEQ ID NO: 1295 - RNA, 22 nt, Homo sapiens
aauugcacgguauccaucugua

SEQ ID NO: 1296 - RNA, 22 nt, Homo sapiens
aauugcacuuuagcaaugguga

SEQ ID NO: 1297 - RNA, 21 nt, Mus musculus
uauugcacuugucccggccug

SEQ ID NO: 1298 - RNA, 22 nt, Mus musculus
uauugcacucgucccggccucc

SEQ ID NO: 1299 - RNA, 22 nt, Mus musculus
aauugcacgguauccaucugua

SEQ ID NO: 1300 - RNA, 22 nt, Mus musculus
aauugcacuuuagcaaugguga

SEQ ID NO: 1301 - RNA, 21 nt, Rattus norvegicus
uauugcacuugucccggccug

SEQ ID NO: 1302 - RNA, 22 nt, Rattus norvegicus
uauugcacucgucccggccucc

SEQ ID NO: 1303 - RNA, 22 nt, Rattus norvegicus
aauugcacgguauccaucugua

SEQ ID NO: 1304 - RNA, 22 nt, Ateles geoffroyi
uauugcacuugucccggccugu

SEQ ID NO: 1305 - RNA, 22 nt, Lagothrix lagotricha
uauugcacuugucccggccugu

SEQ ID NO: 1306 - RNA, 22 nt, Saguinus labiatus
uauugcacuugucccggccugu

SEQ ID NO: 1307 - RNA, 22 nt, Macaca mulatta
uauugcacuugucccggccugu

SEQ ID NO: 1308 - RNA, 22 nt, Macaca mulatta
uauugcacucgucccggccucc

SEQ ID NO: 1309 - RNA, 22 nt, Macaca mulatta
aauugcacgguauccaucugua

SEQ ID NO: 1310 - RNA, 22 nt, Macaca mulatta
aauugcacuuuagcaaugguga

SEQ ID NO: 1311 - RNA, 22 nt, Macaca nemestrina
uauugcacuugucccggccugu

SEQ ID NO: 1312 - RNA, 22 nt, Gorilla gorilla
uauugcacuugucccggccugu

SEQ ID NO: 1313 - RNA, 22 nt, Pan paniscus
uauugcacuugucccggccugu

SEQ ID NO: 1314 - RNA, 22 nt, Pan troglodytes
uauugcacuugucccggccugu

SEQ ID NO: 1315 - RNA, 22 nt, Pongo pygmaeus
uauugcacuugucccggccugu

SEQ ID NO: 1316 - RNA, 22 nt, Lemur catta
uauugcacuugucccggccugu

SEQ ID NO: 1317 - RNA, 22 nt, Canis familiaris
uauugcacuugucccggccugu

SEQ ID NO: 1318 - RNA, 22 nt, Canis familiaris
uauugcacucgucccggccucc

SEQ ID NO: 1319 - RNA, 23 nt, Canis familiaris
aauugcacgguauccaucuguaa

SEQ ID NO: 1320 - RNA, 21 nt, Monodelphis domestica
uauugcacuugucccggccug

SEQ ID NO: 1321 - RNA, 21 nt, Gallus gallus
uauugcacuugucccggccug

SEQ ID NO: 1322 - RNA, 21 nt, Gallus gallus
aauugcacuuuagcaauggug

SEQ ID NO: 1323 - RNA, 21 nt, Xenopus tropicalis
uauugcacuugucccggccug

SEQ ID NO: 1324 - RNA, 21 nt, Xenopus tropicalis
uauugcacucgucccggccuc

SEQ ID NO: 1325 - RNA, 21 nt, Xenopus tropicalis
aauugcacgguauccaucugu

SEQ ID NO: 1326 - RNA, 22 nt, Xenopus tropicalis
aauugcacuguagcaaugguga

SEQ ID NO: 1327 - RNA, 22 nt, Bos taurus
uauugcacuugucccggccugu

SEQ ID NO: 1328 - RNA, 22 nt, Danio rerio
uauugcacuugucccggccugu

SEQ ID NO: 1329 - RNA, 22 nt, Danio rerio
uauugcacucgucccggccucc

SEQ ID NO: 1330 - RNA, 22 nt, Danio rerio
aauugcacgguauccaucugua

SEQ ID NO: 1331 - RNA, 22 nt, Fugu rubripes
uauugcacuugucccggccugu

SEQ ID NO: 1332 - RNA, 22 nt, Tetraodon nigroviridis
uauugcacuugucccggccugu

SEQ ID NO: 1333 - RNA, 22 nt, Homo sapiens
uucaaguaauccaggauaggcu

SEQ ID NO: 1334 - RNA, 17 nt, Homo sapiens
uucaaguaauucaggug

SEQ ID NO: 1335 - RNA, 22 nt, Homo sapiens
cuuucagucagauguuugcugc

SEQ ID NO: 1336 - RNA, 22 nt, Homo sapiens
cuuucagucggauguuuacagc

SEQ ID NO: 1337 - RNA, 23 nt, Homo sapiens
aggcaguguaguuagcugauugc

SEQ ID NO: 1338 - RNA, 20 nt, Mus musculus
aggcagugcgaccuggcucg

SEQ ID NO: 1339 - RNA, 23 nt, Homo sapiens
agcagcauuguacagggcuauga

SEQ ID NO: 1340 - RNA, 23 nt, Mus musculus
agcagcauuguacagggcuauga

SEQ ID NO: 1341 - RNA, 23 nt, Rattus norvegicus
agcagcauuguacagggcuauga

SEQ ID NO: 1342 - RNA, 23 nt, Ateles geoffroyi
agcagcauuguacagggcuauga

SEQ ID NO: 1343 - RNA, 23 nt, Lagothrix lagotricha
agcagcauuguacagggcuauga

SEQ ID NO: 1344 - RNA, 23 nt, Macaca mulatta
agcagcauuguacagggcuauga

SEQ ID NO: 1345 - RNA, 23 nt, Macaca nemestrina
agcagcauuguacagggcuauga

SEQ ID NO: 1346 - RNA, 23 nt, Gorilla gorilla
agcagcauuguacagggcuauga

SEQ ID NO: 1347 - RNA, 23 nt, Pan paniscus
agcagcauuguacagggcuauga

SEQ ID NO: 1348 - RNA, 23 nt, Pan troglodytes
agcagcauuguacagggcuauga

SEQ ID NO: 1349 - RNA, 23 nt, Pongo pygmaeus
agcagcauuguacagggcuauga

SEQ ID NO: 1350 - RNA, 23 nt, Canis familiaris
agcagcauuguacagggcuauga

SEQ ID NO: 1351 - RNA, 23 nt, Monodelphis domestica
agcagcauuguacagggcuauga

SEQ ID NO: 1352 - RNA, 23 nt, Gallus gallus
agcagcauuguacagggcuauga

SEQ ID NO: 1353 - RNA, 23 nt, Xenopus tropicalis
agcagcauuguacagggcuauga

SEQ ID NO: 1354 - RNA, 23 nt, Bos taurus
agcagcauuguacagggcuauga

SEQ ID NO: 1355 - RNA, 23 nt, Sus scrofa
agcagcauuguacagggcuauga

SEQ ID NO: 1356 - RNA, 23 nt, Danio rerio
agcagcauuguacagggcuauga

SEQ ID NO: 1357 - RNA, 23 nt, Fugu rubripes
agcagcauuguacagggcuauga

SEQ ID NO: 1358 - RNA, 23 nt, Tetraodon nigroviridis
agcagcauuguacagggcuauga

SEQ ID NO: 1359 - RNA, 22 nt, Homo sapiens
ucagugcacuacagaacuuugu

SEQ ID NO: 1360 - RNA, 21 nt, Homo sapiens
ucagugcaugacagaacuugg

SEQ ID NO: 1361 - RNA, 21 nt, Mus musculus
ucagugcaugacagaacuugg

SEQ ID NO: 1362 - RNA, 21 nt, Rattus norvegicus
ucagugcaugacagaacuugg

SEQ ID NO: 1363 - RNA, 21 nt, Macaca mulatta
ucagugcaugacagaacuugg

SEQ ID NO: 1364 - RNA, 21 nt, Canis familiaris
ucagugcaugacagaacuugg

SEQ ID NO: 1365 - RNA, 22 nt, Monodelphis domestica
ucagugcaugacagaacuuggg

SEQ ID NO: 1366 - RNA, 22 nt, Danio rerio
ucagugcaugacagaacuuugg

SEQ ID NO: 1367 - RNA, 22 nt, Fugu rubripes
ucagugcauaacagaacuuugu

SEQ ID NO: 1368 - RNA, 22 nt, Tetraodon nigroviridis
ucagugcauaacagaacuuugu

SEQ ID NO: 1369 - RNA, 21 nt, Homo sapiens
ugauauguuugauauuggguu

SEQ ID NO: 1370 - RNA, 22 nt, Homo sapiens
auaagacgaacaaaagguuugu

SEQ ID NO: 1371 - RNA, 21 nt, Danio rerio
guaagacgaacaaaaaguuuu

SEQ ID NO: 1372 - RNA, 22 nt, Homo sapiens
uucccuuugucauccuaugccu

SEQ ID NO: 1373 - RNA, 22 nt, Mus musculus
uucccuuugucauccuaugccu

SEQ ID NO: 1374 - RNA, 22 nt, Rattus norvegicus
uucccuuugucauccuaugccu

SEQ ID NO: 1375 - RNA, 22 nt, Saguinus labiatus
uucccuuugucauccuaugccu

SEQ ID NO: 1376 - RNA, 22 nt, Macaca mulatta
uucccuuugucauccuaugccu

SEQ ID NO: 1377 - RNA, 22 nt, Macaca nemestrina
uucccuuugucauccuaugccu

SEQ ID NO: 1378 - RNA, 22 nt, Gorilla gorilla
uucccuuugucauccuaugccu

SEQ ID NO: 1379 - RNA, 22 nt, Pan paniscus
uucccuuugucauccuaugccu

SEQ ID NO: 1380 - RNA, 22 nt, Pan troglodytes
uucccuuugucauccuaugccu

SEQ ID NO: 1381 - RNA, 22 nt, Pongo pygmaeus
uucccuuugucauccuaugccu

SEQ ID NO: 1382 - RNA, 22 nt, Canis familiaris
uucccuuugucauccuaugccu

SEQ ID NO: 1383 - RNA, 22 nt, Monodelphis domestica
uucccuuugucauccuaugccu

SEQ ID NO: 1384 - RNA, 22 nt, Gallus gallus
uucccuuugucauccuaugccu

SEQ ID NO: 1385 - RNA, 22 nt, Xenopus tropicalis
uucccuuugucauccuaugccu

SEQ ID NO: 1386 - RNA, 22 nt, Bos taurus
uucccuuugucauccuaugccu

SEQ ID NO: 1387 - RNA, 22 nt, Sus scrofa
uucccuuugucauccuaugccu

SEQ ID NO: 1388 - RNA, 22 nt, Danio rerio
uucccuuugucauccuaugccu

SEQ ID NO: 1389 - RNA, 22 nt, Fugu rubripes
uucccuuugucauccuaugccu

SEQ ID NO: 1390 - RNA, 22 nt, Tetraodon nigroviridis
uucccuuugucauccuaugccu

SEQ ID NO: 1391 - RNA, 22 nt, Tetraodon nigroviridis
uucccuuuguuauccuaugccu

SEQ ID NO: 1392 - RNA, 22 nt, Mus musculus
gcagcagggugaaacugacaca

SEQ ID NO: 1393 - RNA, 22 nt, Homo sapiens
aacacaccuauucaaggauuca

SEQ ID NO: 1394 - RNA, 22 nt, Mus musculus
aacacaccuguucaaggauuca

SEQ ID NO: 1395 - RNA, 22 nt, Macaca mulatta
aacacaccuauucaaggauuca

SEQ ID NO: 1396 - RNA, 23 nt, Mus musculus
aaugacaccacauauauggcagc

SEQ ID NO: 1397 - RNA, 24 nt, Danio rerio
aaugacacguuuucucccggaucg

SEQ ID NO: 1398 - RNA, 24 nt, Rattus norvegicus
ucaggcuccuggcuagauuccagg

SEQ ID NO: 1399 - RNA, 22 nt, Homo sapiens
cagugccucggcagugcagccc

SEQ ID NO: 1400 - RNA, 22 nt, Homo sapiens
aagugccuccuuuuagaguguu

SEQ ID NO: 1401 - RNA, 22 nt, Homo sapiens
uucuccaaaagggagcacuuuc

SEQ ID NO: 1402 - RNA, 23 nt, Homo sapiens
uaagugcuuccauguuuugguga

SEQ ID NO: 1403 - RNA, 23 nt, Homo sapiens
uaagugcuuccauguuuuaguag

SEQ ID NO: 1404 - RNA, 23 nt, Homo sapiens
uaagugcuuccauguuucagugg

SEQ ID NO: 1405 - RNA, 23 nt, Homo sapiens
uaagugcuuccauguuugagugu

SEQ ID NO: 1406 - RNA, 17 nt, Homo sapiens
uaagugcuuccaugcuu

SEQ ID NO: 1407 - RNA, 23 nt, Homo sapiens
aaagugcugcgacauuugagcgu

SEQ ID NO: 1408 - RNA, 23 nt, Homo sapiens
gaagugcuucgauuuuggggugu

SEQ ID NO: 1409 - RNA, 22 nt, Homo sapiens
aaagugcuucccuuuggacugu

SEQ ID NO: 1410 - RNA, 21 nt, Homo sapiens
aaagugcuuccuuuuagaggg

SEQ ID NO: 1411 - RNA, 22 nt, Homo sapiens
aaagugcuuccuuuuagagggu

SEQ ID NO: 1412 - RNA, 21 nt, Homo sapiens
aaagugcuuccuuuuugaggg

SEQ ID NO: 1413 - RNA, 22 nt, Mus musculus
aaagugcuuccacuuugugugc

SEQ ID NO: 1414 - RNA, 22 nt, Mus musculus
aaagugcuucccuuuugugugu

SEQ ID NO: 1415 - RNA, 23 nt, Mus musculus
aaagugcuacuacuuuugagucu

SEQ ID NO: 1416 - RNA, 23 nt, Mus musculus
uaagugcuuccauguuuugguga

SEQ ID NO: 1417 - RNA, 23 nt, Mus musculus
uaagugcuuccauguuuuaguag

SEQ ID NO: 1418 - RNA, 23 nt, Mus musculus
uaagugcuuccauguuugagugu

SEQ ID NO: 1419 - RNA, 23 nt, Rattus norvegicus
aaagugcuuccacuuugugugcc

SEQ ID NO: 1420 - RNA, 22 nt, Ateles geoffroyi
aaagugcuguucgugcagguag

SEQ ID NO: 1421 - RNA, 22 nt, Lagothrix lagotricha
aaagugcuguucgugcagguag

SEQ ID NO: 1422 - RNA, 22 nt, Saguinus labiatus
aaagugcuguucgugcagguag

SEQ ID NO: 1423 - RNA, 22 nt, Macaca mulatta
aaagugcuguucgugcagguag

SEQ ID NO: 1424 - RNA, 23 nt, Macaca mulatta
uaagugcuuccauguuuugguga

SEQ ID NO: 1425 - RNA, 23 nt, Macaca mulatta
uaagugcuuccauguuuuaguag

SEQ ID NO: 1426 - RNA, 23 nt, Macaca mulatta
uaagugcuuccauguuucagugg

SEQ ID NO: 1427 - RNA, 23 nt, Macaca mulatta
uaagugcuuccauguuugagugu

SEQ ID NO: 1428 - RNA, 23 nt, Macaca mulatta
aaagugcugcgacauuugagcgu

SEQ ID NO: 1429 - RNA, 23 nt, Macaca mulatta
gaagugcuucgauuuuggggugu

SEQ ID NO: 1430 - RNA, 25 nt, Macaca mulatta
aaagugcuuccuuuuagaggguuac

SEQ ID NO: 1431 - RNA, 22 nt, Macaca nemestrina
aaagugcuguucgugcagguag

SEQ ID NO: 1432 - RNA, 22 nt, Gorilla gorilla
aaagugcuguucgugcagguag

SEQ ID NO: 1433 - RNA, 22 nt, Pan paniscus
aaagugcuguucgugcagguag

SEQ ID NO: 1434 - RNA, 22 nt, Pan troglodytes
aaagugcuguucgugcagguag

SEQ ID NO: 1435 - RNA, 22 nt, Pongo pygmaeus
aaagugcuguucgugcagguag

SEQ ID NO: 1436 - RNA, 22 nt, Canis familiaris
aaagugcuuacagugcagguag

SEQ ID NO: 1437 - RNA, 22 nt, Monodelphis domestica
aaagugcuguucgugcagguag

SEQ ID NO: 1438 - RNA, 20 nt, Monodelphis domestica
uaagugcuuccauguuuuag

SEQ ID NO: 1439 - RNA, 20 nt, Monodelphis domestica
uaagugcuuccauguuuugg

SEQ ID NO: 1440 - RNA, 21 nt, Monodelphis domestica
uaagugcuuccauguuucagu

SEQ ID NO: 1441 - RNA, 21 nt, Monodelphis domestica
uaagugcuuccauguuugagu

SEQ ID NO: 1442 - RNA, 23 nt, Gallus gallus
uaagugcuuccauguuuuaguag

SEQ ID NO: 1443 - RNA, 23 nt, Gallus gallus
uaagugcuuccauguuucagugg

SEQ ID NO: 1444 - RNA, 23 nt, Gallus gallus
uaagugcuuccauguuuuaguug

SEQ ID NO: 1445 - RNA, 22 nt, Xenopus laevis
aaagugcuuucuguuuugggcg

SEQ ID NO: 1446 - RNA, 22 nt, Xenopus laevis
uaagugcucucuaguucgguug

SEQ ID NO: 1447 - RNA, 22 nt, Xenopus tropicalis
aaagugcuguucgugcagguag

SEQ ID NO: 1448 - RNA, 23 nt, Xenopus tropicalis
uaagugcuccaauguuuuagugg

SEQ ID NO: 1449 - RNA, 22 nt, Xenopus tropicalis
uaagugcucucuaguucgguug

SEQ ID NO: 1450 - RNA, 22 nt, Danio rerio
uaagugcuauuuguugggguag

SEQ ID NO: 1451 - RNA, 23 nt, Danio rerio
aaagugcuaucaaguugggguag

SEQ ID NO: 1452 - RNA, 22 nt, Danio rerio
uaagugcuucucuuugggguag

SEQ ID NO: 1453 - RNA, 22 nt, Danio rerio
uaagugcuauuuguuggcguag

SEQ ID NO: 1454 - RNA, 22 nt, Danio rerio
aaagugcuaucaaauuggggua

SEQ ID NO: 1455 - RNA, 22 nt, Mus musculus
aagugcuuccauguuucagugg

SEQ ID NO: 1456 - RNA, 22 nt, Gallus gallus
aagugcuuccauguuuuaguga

SEQ ID NO: 1457 - RNA, 24 nt, Homo sapiens
acaaagugcuucccuuuagagugu

SEQ ID NO: 1458 - RNA, 22 nt, Macaca mulatta
aaaaugguucccuuuagagugu

SEQ ID NO: 1459 - RNA, 21 nt, Homo sapiens
gaaggcgcuucccuuuggagu

SEQ ID NO: 1460 - RNA, 22 nt, Homo sapiens
ucugggcaacaaagugagaccu

SEQ ID NO: 1461 - RNA, 22 nt, Homo sapiens
uggugggcacagaaucuggacu

SEQ ID NO: 1462 - RNA, 22 nt, Homo sapiens
ugagguaguagguuguauaguu

SEQ ID NO: 1463 - RNA, 22 nt, Homo sapiens
ugagguaguagguugugugguu

SEQ ID NO: 1464 - RNA, 22 nt, Homo sapiens
ugagguaguagguuguaugguu

SEQ ID NO: 1465 - RNA, 22 nt, Homo sapiens
agagguaguagguugcauaguu

SEQ ID NO: 1466 - RNA, 22 nt, Homo sapiens
ugagguaguagauuguauaguu

SEQ ID NO: 1467 - RNA, 22 nt, Homo sapiens
ugagguaguaguuuguacaguu

SEQ ID NO: 1468 - RNA, 22 nt, Homo sapiens
ugagguaguaguuugugcuguu

SEQ ID NO: 1469 - RNA, 22 nt, Homo sapiens
ugagguaguaaguuguauuguu

SEQ ID NO: 1470 - RNA, 22 nt, Mus musculus
ugagguaguaaguuguauuguu

SEQ ID NO: 1471 - RNA, 22 nt, Rattus norvegicus
ugagguaguaaguuguauuguu

SEQ ID NO: 1472 - RNA, 22 nt, Ateles geoffroyi
ugagguaguaaguuguauuguu

SEQ ID NO: 1473 - RNA, 22 nt, Macaca mulatta
ugagguaguaaguuguauuguu

SEQ ID NO: 1474 - RNA, 22 nt, Gorilla gorilla
ugagguaguaaguuguauuguu

SEQ ID NO: 1475 - RNA, 22 nt, Pan paniscus
ugagguaguaaguuguauuguu

SEQ ID NO: 1476 - RNA, 22 nt, Pan troglodytes
ugagguaguaaguuguauuguu

SEQ ID NO: 1477 - RNA, 22 nt, Pongo pygmaeus
ugagguaguaaguuguauuguu

SEQ ID NO: 1478 - RNA, 22 nt, Canis familiaris
ugagguaguaaguuguauuguu

SEQ ID NO: 1479 - RNA, 22 nt, Xenopus tropicalis
ugagguaguaaguuguauuguu

SEQ ID NO: 1480 - RNA, 22 nt, Bos taurus
ugagguaguaaguuguauuguu

SEQ ID NO: 1481 - RNA, 21 nt, Homo sapiens
aucacauugccagggauuucc

SEQ ID NO: 1482 - RNA, 22 nt, Homo sapiens
uucacauugugcuacugucugc

SEQ ID NO: 1483 - RNA, 21 nt, Homo sapiens
uucacaguggcuaaguuccgc

SEQ ID NO: 1484 - RNA, 23 nt, Homo sapiens
aaggagcuuacaaucuagcuggg

SEQ ID NO: 1485 - RNA, 23 nt, Mus musculus
aaggagcuuacaaucuagcuggg

SEQ ID NO: 1486 - RNA, 23 nt, Rattus norvegicus
aaggagcuuacaaucuagcuggg

SEQ ID NO: 1487 - RNA, 23 nt, Canis familiaris
aaggagcuuacaaucuagcuggg

SEQ ID NO: 1488 - RNA, 21 nt, Homo sapiens
gugcauuguaguugcauugca

SEQ ID NO: 1489 - RNA, 22 nt, Homo sapiens
cuuggcaccuagcaagcacuca

SEQ ID NO: 1490 - RNA, 21 nt, Ateles geoffroyi
uuuggcacuuuuuagagugaa

SEQ ID NO: 1491 - RNA, 20 nt, Canis familiaris
cuuggcaccuaguaagcacu

SEQ ID NO: 1492 - RNA, 22 nt, Homo sapiens
aacccguagauccgaucuugug

SEQ ID NO: 1493 - RNA, 22 nt, Homo sapiens
cacccguagaaccgaccuugcg

SEQ ID NO: 1494 - RNA, 22 nt, Mus musculus
aacccguagauccgaucuugug

SEQ ID NO: 1495 - RNA, 22 nt, Mus musculus
cacccguagaaccgaccuugcg

SEQ ID NO: 1496 - RNA, 22 nt, Rattus norvegicus
aacccguagauccgaucuugug

SEQ ID NO: 1497 - RNA, 22 nt, Rattus norvegicus
cacccguagaaccgaccuugcg

SEQ ID NO: 1498 - RNA, 22 nt, Lagothrix lagotricha
aacccguagauccgaucuugug

SEQ ID NO: 1499 - RNA, 22 nt, Macaca mulatta
aacccguagauccgaucuugug

SEQ ID NO: 1500 - RNA, 22 nt, Macaca mulatta
cacccguagaaccgaccuugcg

SEQ ID NO: 1501 - RNA, 22 nt, Macaca nemestrina
aacccguagauccgaucuugug

SEQ ID NO: 1502 - RNA, 22 nt, Gorilla gorilla
aacccguagauccgaucuugug

SEQ ID NO: 1503 - RNA, 22 nt, Pan paniscus
aacccguagauccgaucuugug

SEQ ID NO: 1504 - RNA, 22 nt, Pan troglodytes
aacccguagauccgaucuugug

SEQ ID NO: 1505 - RNA, 22 nt, Pongo pygmaeus
aacccguagauccgaucuugug

SEQ ID NO: 1506 - RNA, 21 nt, Canis familiaris
aacccguagauccgaucuugu

SEQ ID NO: 1507 - RNA, 22 nt, Canis familiaris
cacccguagaaccgaccuugcg

SEQ ID NO: 1508 - RNA, 22 nt, Gallus gallus
aacccguagauccgaucuugug

SEQ ID NO: 1509 - RNA, 22 nt, Xenopus tropicalis
aacccguagauccgaucuugug

SEQ ID NO: 1510 - RNA, 21 nt, Bos taurus
aacccguagauccgaucuugu

SEQ ID NO: 1511 - RNA, 22 nt, Bos taurus
cacccguagaaccgaccuugcg

SEQ ID NO: 1512 - RNA, 22 nt, Sus scrofa
cacccguagaaccgaccuugcg

SEQ ID NO: 1513 - RNA, 22 nt, Danio rerio
aacccguagauccgaucuugug

SEQ ID NO: 1514 - RNA, 21 nt, Homo sapiens
ucacagugaaccggucucuuu

SEQ ID NO: 1515 - RNA, 24 nt, Danio rerio
uuuuuugcagaaacguuucagauu

SEQ ID NO: 1516 - RNA, 23 nt, Homo sapiens
uauggcuuuuuauuccuauguga

SEQ ID NO: 1517 - RNA, 23 nt, Homo sapiens
aacauucauugcugucggugggu

SEQ ID NO: 1518 - RNA, 22 nt, Homo sapiens
aacauucaaccugucggugagu

SEQ ID NO: 1519 - RNA, 23 nt, Homo sapiens
aacauucauuguugucggugggu

SEQ ID NO: 1520 - RNA, 22 nt, Homo sapiens
caucuuacugggcagcauugga

SEQ ID NO: 1521 - RNA, 22 nt, Homo sapiens
acuuuaacauggaggcacuugc

SEQ ID NO: 1522 - RNA, 22 nt, Homo sapiens
acucaaaacccuucagugacuu

SEQ ID NO: 1523 - RNA, 22 nt, Mus musculus
acucaaaauggaggcccuaucu

SEQ ID NO: 1524 - RNA, 22 nt, Homo sapiens
auauaauacaaccugcuaagug

SEQ ID NO: 1525 - RNA, 22 nt, Homo sapiens
aucauagaggaaaauccauguu

SEQ ID NO: 1526 - RNA, 22 nt, Homo sapiens
uaauacugccugguaaugauga

SEQ ID NO: 1527 - RNA, 22 nt, Macaca mulatta
caauacuggcaauuacuuuucc

SEQ ID NO: 1528 - RNA, 22 nt, Homo sapiens
aucgugcaucccuuuagagugu

SEQ ID NO: 1529 - RNA, 22 nt, Homo sapiens
gaaagcgcuucccuuugcugga

SEQ ID NO: 1530 - RNA, 22 nt, Homo sapiens
caaagcgcuccccuuuagaggu

SEQ ID NO: 1531 - RNA, 21 nt, Homo sapiens
caaagcgcuucccuuuggagc

SEQ ID NO: 1532 - RNA, 21 nt, Homo sapiens
gaaagcgcuucucuuuagagg

SEQ ID NO: 1533 - RNA, 20 nt, Homo sapiens
cuacaaagggaagcccuuuc

SEQ ID NO: 1534 - RNA, 20 nt, Macaca mulatta
cuacaaagggaagcccuuuc

SEQ ID NO: 1535 - RNA, 20 nt, Macaca mulatta
cuacaaagggaagcccuuuc

SEQ ID NO: 1536 - RNA, 22 nt, Homo sapiens
cgucuuacccagcaguguuugg

SEQ ID NO: 1537 - RNA, 22 nt, Mus musculus
cgucuuacccagcaguguuugg

SEQ ID NO: 1538 - RNA, 22 nt, Macaca mulatta
uugagucugaugaaucauuagg

SEQ ID NO: 1539 - RNA, 22 nt, Homo sapiens
uaacacugucugguaaagaugg

SEQ ID NO: 1540 - RNA, 22 nt, Mus musculus
uaacacugucugguaaagaugg

SEQ ID NO: 1541 - RNA, 22 nt, Rattus norvegicus
uaacacugucugguaaagaugg

SEQ ID NO: 1542 - RNA, 22 nt, Monodelphis domestica
uaacacugucugguaaagaugc

SEQ ID NO: 1543 - RNA, 22 nt, Danio rerio
uaacacugucugguaacgaugc

SEQ ID NO: 1544 - RNA, 89 nt, Homo sapiens
gucagcagugccuuagcagcacguaaauauuggcguuaagauucuaaaauuaucuccaguauuaacugugcugcugaaguaagguugac

SEQ ID NO: 1545 - RNA, 81 nt, Homo sapiens
guuccacucuagcagcacguaaauauuggcguagugaaauauauauuaaacaccaauauuacugugcugcuuuagugugac

SEQ ID NO: 1546 - RNA, 87 nt, Homo sapiens
agcuucccuggcucuagcagcacagaaauauuggcacagggaagcgagucugccaauauuggcugugcugcuccaggcaggguggug

SEQ ID NO: 1547 - RNA, 84 nt, Homo sapiens
gucagaauaaugucaaagugcuuacagugcagguagugauaugugcaucuacugcagugaaggcacuuguagcauuauggugac

SEQ ID NO: 1548 - RNA, 71 nt, Homo sapiens
uguucuaaggugcaucuagugcagauagugaaguagauuagcaucuacugcccuaagugcuccuucuggca

SEQ ID NO: 1549 - RNA, 71 nt, Homo sapiens
uguguuaaggugcaucuagugcaguuagugaagcagcuuagaaucuacugcccuaaaugccccuucuggca

SEQ ID NO: 1550 - RNA, 69 nt, Homo sapiens
aguaccaaagugcucauagugcagguaguuuuggcaugacucuacuguaguaugggcacuuccaguacu

SEQ ID NO: 1551 - RNA, 72 nt, Homo sapiens
ugucggguagcuuaucagacugauguugacuguugaaucucauggcaacaccagucgaugggcugucugaca

SEQ ID NO: 1552 - RNA, 68 nt, Homo sapiens
cuccggugccuacugagcugauaucaguucucauuuuacacacuggcucaguucagcaggaacaggag

SEQ ID NO: 1553 - RNA, 73 nt, Homo sapiens
cucugccucccgugccuacugagcugaaacacaguugguuuguguacacuggcucaguucagcaggaacaggg

SEQ ID NO: 1554 - RNA, 84 nt, Homo sapiens
ggccaguguugagaggcggagacuugggcaauugcuggacgcugcccugggcauugcacuugucucggucugacagugccggcc

SEQ ID NO: 1555 - RNA, 70 nt, Homo sapiens
ggagauauugcacauuacuaaguugcauguugucacggccucaaugcaauuuagugugugugauauuuuc

SEQ ID NO: 1556 - RNA, 77 nt, Homo sapiens
ccgggacccaguucaaguaauucaggauagguugugugcuguccagccuguucuccauuacuuggcucggggaccgg

SEQ ID NO: 1557 - RNA, 71 nt, Homo sapiens
gcgacuguaaacauccucgacuggaagcugugaagccacagaugggcuuucagucggauguuugcagcugc

SEQ ID NO: 1558 - RNA, 110 nt, Homo sapiens
ggccagcugugaguguuucuuuggcagugucuuagcugguuguugugagcaauaguaaggaagcaaucagcaaguauacugcccuagaagugcugcacguuguggggccc

SEQ ID NO: 1559 - RNA, 91 nt, Homo sapiens
cugugugugaugagcuggcaguguauuguuagcugguugaauaugugaauggcaucggcuaacaugcaacugcugucuuauugcauauaca

SEQ ID NO: 1560 - RNA, 97 nt, Homo sapiens
ugaccugaaucagguaggcaguguauuguuagcuggcugcuugggucaagucagcagccacaacuacccugccacuugcuucuggauaaauucuucu

SEQ ID NO: 1561 - RNA, 81 nt, Homo sapiens
cucucugcuuucagcuucuuuacaguguugccuuguggcauggaguucaagcagcauuguacagggcuaucaaagcacaga

SEQ ID NO: 1562 - RNA, 100 nt, Homo sapiens
ugugucucucucuguguccugccagugguuuuacccuaugguagguuacgucaugcuguucuaccacaggguagaaccacggacaggauaccggggcacc

SEQ ID NO: 1563 - RNA, 99 nt, Homo sapiens
caagcacgauuagcauuugaggugaaguucuguuauacacucaggcuguggcucucugaaagucagugcaucacagaacuuugucucgaaagcuuucua

SEQ ID NO: 1564 - RNA, 85 nt, Homo sapiens
ugcaggccucugugugauauguuugauauauuagguuguuauuuaauccaacuauauaucaaacauauuccuacagugucuugcc

SEQ ID NO: 1565 - RNA, 71 nt, Homo sapiens
gccaacccaguguucagacuaccuguucaggaggcucucaauguguacaguagucugcacauugguuaggc

SEQ ID NO: 1566 - RNA, 110 nt, Homo sapiens
aggaagcuucuggagauccugcuccgucgccccaguguucagacuaccuguucaggacaaugccguuguacaguagucugcacauugguuagacugggcaagggagagca

SEQ ID NO: 1567 - RNA, 110 nt, Homo sapiens
ccagaggacaccuccacuccgucuacccaguguuuagacuaucuguucaggacucccaaauuguacaguagucugcacauugguuaggcugggcuggguuagacccucgg

SEQ ID NO: 1568 - RNA, 110 nt, Homo sapiens
cgccucagagccgcccgccguuccuuuuuccuaugcauauacuucuuugaggaucuggccuaaagagguauagggcaugggaaaacggggcggucggguccuccccagcg

SEQ ID NO: 1569 - RNA, 71 nt, Homo sapiens
ugacgggcgagcuuuuggcccggguuauaccugaugcucacguauaagacgagcaaaaagcuuguugguca

SEQ ID NO: 1570 - RNA, 110 nt, Homo sapiens
acccggcagugccuccaggcgcagggcagccccugcccaccgcacacugcgcugccccagacccacugugcgugugacagcggcugaucugugccugggcagcgcgaccc

SEQ ID NO: 1571 - RNA, 110 nt, Homo sapiens
ucaccuggccaugugacuugugggcuucccuuugucauccuucgccuagggcucugagcagggcagggacagcaaaggggugcucaguugucacuucccacagcacggag

SEQ ID NO: 1572 - RNA, 110 nt, Homo sapiens
ggccuggcuggacagaguugucaugugucugccugucuacacuugcugugcagaacauccgcucaccuguacagcaggcacagacaggcagucacaugacaacccagccu

SEQ ID NO: 1573 - RNA, 110 nt, Homo sapiens
gugauaauguagcgagauuuucuguugugcuugaucuaaccaugugguugcgagguaugaguaaaacaugguuccgucaagcaccauggaacgucacgcagcuuucuaca

SEQ ID NO: 1574 - RNA, 110 nt, Homo sapiens
gaccagucgcugcggggcuuuccuuugugcuugaucuaaccaugugguggaacgauggaaacggaacaugguucugucaagcaccgcggaaagcaccgugcucuccugca

SEQ ID NO: 1575 - RNA, 63 nt, Homo sapiens
aagaaaugguuuaccgucccacauacauuuugaauauguaugugggaugguaaaccgcuucuu

SEQ ID NO: 1576 - RNA, 98 nt, Homo sapiens
auacagugcuugguuccuaguagguguccaguaaguguuugugacauaauuuguuuauugaggaccuccuaucaaucaagcacugugcuaggcucugg

SEQ ID NO: 1577 - RNA, 75 nt, Homo sapiens
uggagugggggggcaggaggggcucagggagaaagugcauacagccccuggcccucucugcccuuccguccccug

SEQ ID NO: 1578 - RNA, 80 nt, Homo sapiens
gguaccugaagagagguuuucuggguuucuguuucuuuaaugaggacgaaacacaccugguuaaccucuuuuccaguauc

SEQ ID NO: 1579 - RNA, 84 nt, Homo sapiens
gugguaccugaagagagguuuucuggguuucuguuucuuuauugaggacgaaacacaccugguuaaccucuuuuccaguaucaa

SEQ ID NO: 1580 - RNA, 67 nt, Homo sapiens
ucuccaacaauauccuggugcugagugaugacucaggcgacuccagcaucagugauuuuguugaaga

SEQ ID NO: 1581 - RNA, 98 nt, Homo sapiens
acccaaacccuaggucugcugacuccuaguccagggcucgugauggcuggugggcccugaacgaggggucuggaggccuggguuugaauaucgacagc

SEQ ID NO: 1582 - RNA, 87 nt, Homo sapiens
gaaagcgcuuuggaaugacacgaucacucccguugagugggcacccgagaagccaucgggaaugucguguccgcccagugcucuuuc

SEQ ID NO: 1583 - RNA, 79 nt, Homo sapiens
agccucgucaggcucaguccccucccgauaaaccccuaaauagggacuuucccggggggugacccuggcuuuuuuggcg

SEQ ID NO: 1584 - RNA, 73 nt, Homo sapiens
acuuggagagaggcuggccgugaugaauucgauucaucaaagcgagucauacacggcucuccucucuuuuagu

SEQ ID NO: 1585 - RNA, 68 nt, Homo sapiens
guauccuguacugagcugccccgagcugggcagcaugaagggccucggggcagcucaguacaggaugc

SEQ ID NO: 1586 - RNA, 83 nt, Homo sapiens
gagaaucaucucucccagauaauggcacucucaaacaaguuuccaaauuguuugaaaggcuauuucuuggucagaugacucuc

SEQ ID NO: 1587 - RNA, 74 nt, Homo sapiens
gugguguccuacucaggagaguggcaaucacauguaauuaggugugauugaaaccucuaagaguggaguaacac

SEQ ID NO: 1588 - RNA, 83 nt, Homo sapiens
ucucaugcagucauucuccaaaagaaagcacuuucuguugucugaaagcagagugccuucuuuuggagcguuacuguuugaga

SEQ ID NO: 1589 - RNA, 83 nt, Homo sapiens; identical to SEQ ID NO: 1588

SEQ ID NO: 1590 - RNA, 87 nt, Homo sapiens
ucucaggcagugacccucuagauggaagcacugucuguuguauaaaagaaaagaucgugcaucccuuuagaguguuacuguuugaga

SEQ ID NO: 1591 - RNA, 67 nt, Homo sapiens
gugacccucuagauggaagcacugucuguugucuaagaaaagaucgugcaucccuuuagaguguuac

SEQ ID NO: 1592 - RNA, 95 nt, Homo sapiens
gaagaucucaggcagugacccucuagauggaagcacugucuguugucuaagaaaagaucgugcauccuuuuagaguguuacuguuugagaaaauc

SEQ ID NO: 1593 - RNA, 87 nt, Homo sapiens
ucucaagcugugagucuacaaagggaagcccuuucuguugucuaaaagaaaagaaagugcuucucuuugguggguuacgguuugaga

SEQ ID NO: 1594 - RNA, 87 nt, Homo sapiens
ucucaggcugugacccucuaaagggaagcgcuuucuguggucagaaagaaaagcaagugcuuccuuuuagaggguuaccguuuggga

SEQ ID NO: 1595 - RNA, 88 nt, Homo sapiens
ucccaugcugugacccucuagaggaagcacuuucuguuuguugucugagaaaaaacaaagugcuucccuuuagaguuacuguuuggga

SEQ ID NO: 1596 - RNA, 87 nt, Homo sapiens
ucucaggcugugucccucuagagggaagcgcuuucuguugucugaaagaaaagaaaaugguucccuuuagaguguuacgcuuugaga

SEQ ID NO: 1597 - RNA, 85 nt, Homo sapiens
cucaagcugugacucuccagagggaugcacuuucucuuaugugaaaaaaaagaaggcgcuucccuuuagagcguuacgguuuggg

SEQ ID NO: 1598 - RNA, 99 nt, Homo sapiens
uuuagcgguuucucccugaagugauguguaacugaucaggaucuacucaugucgucuuugguaaaguuaugucgcuugucagggugaggagaguuuuug

SEQ ID NO: 1599 - RNA, 96 nt, Homo sapiens
cuccuaugcacccucuuuccauaggugaugagucacagggcucagggaaugugucugcaccugugacucaucaccaguggaaagcccaucccauau

SEQ ID NO: 1600 - RNA, 100 nt, Homo sapiens
cccccagaaucugucaggcaccagccaggcauugcucagcccguuucccucugggggagcaaggaguggugcuggguuugucucugcugggguuucuccu

SEQ ID NO: 1601 - RNA, 96 nt, Homo sapiens
acggaagccugcacgcauuuaacaccagcacgcucaauguagucuuguaaggaacagguugaagugugccguggugugucuggaggaagcgccugu

SEQ ID NO: 1602 - RNA, 94 nt, Homo sapiens
agagcaucgugcuugaccuuccacgcucucguguccacuagcaggcagguuuucugacacaggcugcggaauucaggacagugcaucauggaga

SEQ ID NO: 1603 - RNA, 100 nt, Homo sapiens
ucccaucuggacccugcugggcagggcuucugagcuccuuagcacuagcaggaggggcuccaggggcccucccuccauggcagccaggacaggacucuca

SEQ ID NO: 1604 - RNA, 85 nt, Homo sapiens
aggguagagggaugagggggaaaguucuauaguccuguaauuagaucucaggacuauagaacuuucccccucaucccucugcccu

SEQ ID NO: 1605 - RNA, 97 nt, Homo sapiens
aaacccacaccacugcauuuuggccaucgaggguuggggcuuggugucaugccccaagauaaccagcaccccaacuuuggacagcauggauuagucu

SEQ ID NO: 1606 - RNA, 98 nt, Homo sapiens
cagagaggagcugccacuugggcacugaaacaauguccauuaggcuuuguuauggaaacuucuccugaucauuguuuuguguccauugagcuuccaau

SEQ ID NO: 1607 - RNA, 99 nt, Homo sapiens
uggcuaagguguuggcucgggcuccccacugcaguuacccuccccucggcguuacugagcacugggggcuuucgggcucugcgucugcacagauacuuc

SEQ ID NO: 1608 - RNA, 96 nt, Homo sapiens
aggaaguguuggccuguggcugcacucacuuccuucagccccaggaagccuuggucgggggcaggagggagggucaggcagggcugggggccugac

SEQ ID NO: 1609 - RNA, 96 nt, Homo sapiens
cagugcuggggucucaggaggcagcgcucucaggacgucaccaccauggccugggcucugcuccuccucacccuccucacucagggcacaggugau

SEQ ID NO: 1610 - RNA, 81 nt, Homo sapiens
ggguaaguggaaagauggugggccgcagaacaugugcugaguucgugccauaugucugcugaccaucaccuuuagaagccc

SEQ ID NO: 1611 - RNA, 100 nt, Homo sapiens
gcucgguugccgugguugcgggcccugcccgcccgccagcucgcugacagcacgacucagggcggagggaaguagguccguuggucggucgggaacgagg

SEQ ID NO: 1612 - RNA, 97 nt, Homo sapiens
cugcuccuucucccauacccauugcauaucggaguugugaauucucaaaacaccuccugugugcauggauuacaggagggugagccuugucaucgug

SEQ ID NO: 1613 - RNA, 66 nt, Homo sapiens
gguaagugcgccucgggugagcaugcacuuaauguggguguaugucacucggcucggcccacuacc

SEQ ID NO: 1614 - RNA, 73 nt, Homo sapiens
cccagggucuggugcggagagggcccacaguggacuuggugacgcuguaugcccucaccgcucagccccuggg

SEQ ID NO: 1615 - RNA, 114 nt, Homo sapiens
uuuaggcgcugaugaaaguggaguucaguagacagcccuuuucaagcccuacgagaaacugggguuucuggaggagaaggaaggugaugaaggaucuguucucgugagccugaa

SEQ ID NO: 1616 - RNA, 111 nt, Homo sapiens
gcauccucaggaccugggcuugggugguaggaggaauuggugcuggucuuucauuuuggauuugacuccagccccacagccucagccaccccagccaauugucauaggagc

SEQ ID NO: 1617 - RNA, 85 nt, Homo sapiens
augguguuaucaaguguaacagcaacuccauguggacuguguaccaauuuccaguggagaugcuguuacuuuugaugguuaccaa

SEQ ID NO: 1618 - RNA, 85 nt, Homo sapiens
ugguucccgcccccuguaacagcaacuccauguggaagugcccacugguuccaguggggcugcuguuaucuggggcgagggccag

SEQ ID NO: 1619 - RNA, 84 nt, Homo sapiens
gcucccccucucuaauccuugcuaccugggugagagugcugucugaaugcaaugcaccugggcaaggauucugagagcgagagc

SEQ ID NO: 1620 - RNA, 75 nt, Homo sapiens
ggcugugccggguagagagggcagugggagguaagagcucuucacccuucaccaccuucuccacccagcauggcc

SEQ ID NO: 1621 - RNA, 110 nt, Homo sapiens
ugaacauccaggucuggggcaugaaccuggcauacaauguagauuucuguguucguuaggcaacagcuacauugucugcuggguuucaggcuaccuggaaacauguucuc

SEQ ID NO: 1622 - RNA, 79 nt, Homo sapiens
cccgggcugagguaggagguuguauaguugaggaggacacccaaggagaucacuauacggccuccuagcuuuccccagg

SEQ ID NO: 1623 - RNA, 71 nt, Homo sapiens
ugggaaacauacuucuuuauaugcccauauggaccugcuaagcuauggaauguaaagaaguauguaucuca

SEQ ID NO: 1624 - RNA, 85 nt, Homo sapiens
accuacucagaguacauacuucuuuauguacccauaugaacauacaaugcuauggaauguaaagaaguauguauuuuugguaggc

SEQ ID NO: 1625 - RNA, 86 nt, Homo sapiens
ugcuucccgaggccacaugcuucuuuauauccccauauggauuacuuugcuauggaauguaaggaagugugugguuucggcaagug

SEQ ID NO: 1626 - RNA, 95 nt, Homo sapiens
ggugagugcguuuccaagugugaagggacccuuccuguagugucuuauauacaauacaguaggaauguuccuucuuugccacucauacaccuuua

SEQ ID NO: 1627 - RNA, 89 nt, Homo sapiens
cgggguugguuguuaucuuugguuaucuagcuguaugagugguguggagucuucauaaagcuagauaaccgaaaguaaaaauaacccca

SEQ ID NO: 1628 - RNA, 87 nt, Homo sapiens
ggaagcgaguuguuaucuuugguuaucuagcuguaugaguguauuggucuucauaaagcuagauaaccgaaaguaaaaacuccuuca

SEQ ID NO: 1629 - RNA, 90 nt, Homo sapiens
ggaggcccguuucucucuuugguuaucuagcuguaugagugccacagagccgucauaaagcuagauaaccgaaaguagaaaugauucuca

SEQ ID NO: 1630 - RNA, 97 nt, Homo sapiens
cucaggugcucuggcugcuuggguuccuggcaugcugauuugugacuuaagauuaaaaucacauugccagggauuaccacgcaaccacgaccuuggc

SEQ ID NO: 1631 - RNA, 97 nt, Homo sapiens
accucucuaacaaggugcagagcuuagcugauuggugaacagugauugguuuccgcuuuguucacaguggcuaaguucugcaccugaagagaaggug

SEQ ID NO: 1632 - RNA, 86 nt, Homo sapiens
gguccuugcccucaaggagcucacagucuauugaguuaccuuucugacuuucccacuagauugugagcuccuggagggcaggcacu

SEQ ID NO: 1633 - RNA, 71 nt, Homo sapiens
ggagaggaggcaagaugcuggcauagcuguugaacugggaaccugcuaugccaacauauugccaucuuucc

SEQ ID NO: 1634 - RNA, 96 nt, Homo sapiens
gcgggcggccccgcggugcauugcuguugcauugcacgugugugaggcgggugcagugccucggcagugcagcccggagccggccccuggcaccac

SEQ ID NO: 1635 - RNA, 78 nt, Homo sapiens
uggccgauuuuggcacuagcacauuuuugcuugugucucuccgcucugagcaaucaugugcagugccaauaugggaaa

SEQ ID NO: 1636 - RNA, 80 nt, Homo sapiens
ccuguugccacaaacccguagauccgaacuugugguauuaguccgcacaagcuuguaucuauagguaugugucuguuagg

SEQ ID NO: 1637 - RNA, 81 nt, Homo sapiens
ccuuggccauguaaaagugcuuacagugcagguagcuuuuugagaucuacugcaauguaagcacuucuuacauuaccaugg

SEQ ID NO: 1638 - RNA, 85 nt, Homo sapiens
cgcuggcgacgggacauuauuacuuuugguacgcgcugugacacuucaaacucguaccgugaguaauaaugcgccguccacggca

SEQ ID NO: 1639 - RNA, 97 nt, Homo sapiens
ugugaucacugucuccagccugcugaagcucagagggcucugauucagaaagaucaucggauccgucugagcuuggcuggucggaagucucaucauc

SEQ ID NO: 1640 - RNA, 84 nt, Homo sapiens
ugugcagugggaaggggggccgauacacuguacgagagugaguagcaggucucacagugaaccggucucuuucccuacuguguc

SEQ ID NO: 1641 - RNA, 72 nt, Homo sapiens
ggaucuuuuugcggucugggcuugcuguuccucucaacaguagucaggaagcccuuaccccaaaaaguaucu

SEQ ID NO: 1642 - RNA, 90 nt, Homo sapiens
ugcccuucgcgaaucuuuuugcggucugggcuugcuguacauaacucaauagccggaagcccuuaccccaaaaagcauuugcggagggcg

SEQ ID NO: 1643 - RNA, 88 nt, Homo sapiens
acaaugcuuugcuagagcugguaaaauggaaccaaaucgccucuucaauggauuugguccccuucaaccagcuguagcuaugcauuga

SEQ ID NO: 1644 - RNA, 102 nt, Homo sapiens
gggagccaaaugcuuugcuagagcugguaaaauggaaccaaaucgacuguccaauggauuugguccccuucaaccagcuguagcugugcauugauggcgccg

SEQ ID NO: 1645 - RNA, 119 nt, Homo sapiens
ccucagaagaaagaugcccccugcucuggcuggucaaacggaaccaaguccgucuuccugagagguuugguccccuucaaccagcuacagcagggcuggcaaugcccaguccuuggaga

SEQ ID NO: 1646 - RNA, 97 nt, Homo sapiens
cacucugcuguggccuauggcuuuucauuccuaugugauugcugucccaaacucauguagggcuaaaagccaugggcuacagugaggggcgagcucc

SEQ ID NO: 1647 - RNA, 82 nt, Homo sapiens
ugagcccucggaggacuccauuuguuuugaugauggauucuuaugcuccaucaucgucucaaaugagucuucagaggguucu

SEQ ID NO: 1648 - RNA, 87 nt, Homo sapiens
gacagugcagucacccauaaaguagaaagcacuacuaacagcacuggaggguguaguguuuccuacuuuauggaugaguguacugug

SEQ ID NO: 1649 - RNA, 99 nt, Homo sapiens
ccgauguguauccucagcuuugagaacugaauuccauggguugugucagugucagaccucugaaauucaguucuucagcugggauaucucugucaucgu

SEQ ID NO: 1650 - RNA, 73 nt, Homo sapiens
ccuggcacugagaacugaauuccauaggcugugagcucuagcaaugcccuguggacucaguucuggugcccgg

SEQ ID NO: 1651 - RNA, 110 nt, Homo sapiens
agaagggcuaucaggccagccuucagaggacuccaaggaacauucaacgcugucggugaguuugggauuugaaaaaaccacugaccguugacuguaccuugggguccuua

SEQ ID NO: 1652 - RNA, 110 nt, Homo sapiens
gagcugcuugccuccccccguuuuuggcaaugguagaacucacacuggugagguaacaggauccggugguucuagacuugccaacuauggggcgaggacucagccggcac

SEQ ID NO: 1653 - RNA, 110 nt, Homo sapiens
ccgcagagugugacuccuguucuguguauggcacugguagaauucacugugaacagucucagucagugaauuaccgaagggccauaaacagagcagagacagauccacga

SEQ ID NO: 1654 - RNA, 109 nt, Homo sapiens
ggucgggcucaccaugacacagugugagaccucgggcuacaacacaggacccgggcgcugcucugaccccucgugucuuguguugcagccggagggacgcagguccgca

SEQ ID NO: 1655 - RNA, 110 nt, Homo sapiens
gccgagaccgagugcacagggcucugaccuaugaauugacagccagugcucucgucuccccucuggcugccaauuccauaggucacagguauguucgccucaaugccagc

SEQ ID NO: 1656 - RNA, 110 nt, Homo sapiens
aucauucagaaaugguauacaggaaaaugaccuaugaauugacagacaauauagcugaguuugucugucauuucuuuaggccaauauucuguaugacugugcuacuucaa

SEQ ID NO: 1657 - RNA, 90 nt, Homo sapiens
ccgggccccugugagcaucuuaccggacagugcuggauuucccagcuugacucuaacacugucugguaacgauguucaaaggugacccgc

SEQ ID NO: 1658 - RNA, 110 nt, Homo sapiens
gauggcugugaguuggcuuaaucucagcuggcaacugugagauguucauacaaucccucacaguggucucugggauuaugcuaaacagagcaauuuccuagcccucacga

SEQ ID NO: 1659 - RNA, 110 nt, Homo sapiens
aguauaauuauuacauaguuuuugaugucgcagauacugcaucaggaacugauuggauaagaaucagucaccaucaguuccuaaugcauugccuucagcaucuaaacaag

SEQ ID NO: 1660 - RNA, 110 nt, Homo sapiens
gacaguguggcauuguagggcuccacaccguaucugacacuuugggcgagggcaccaugcugaagguguucaugaugcggucugggaacuccucacggaucuuacugaug

SEQ ID NO: 1661 - RNA, 110 nt, Homo sapiens
gcugcuggaagguguagguacccucaauggcucaguagccaguguagauccugucuuucguaaucagcagcuacaucuggcuacugggucucugauggcaucuucuagcu

SEQ ID NO: 1662 - RNA, 110 nt, Homo sapiens
ccuggccuccugcagugccacgcuccguguauuugacaagcugaguuggacacuccaugugguagagugucaguuugucaaauaccccaagugcggcacaugcuuaccag

SEQ ID NO: 1663 - RNA, 81 nt, Homo sapiens
gggcuuucaagucacuagugguuccguuuaguagaugauugugcauuguuucaaaauggugcccuagugacuacaaagccc

SEQ ID NO: 1664 - RNA, 80 nt, Homo sapiens
aggacccuuccagagggcccccccucaauccuguugugccuaauucagaggguuggguggaggcucuccugaagggcucu

SEQ ID NO: 1665 - RNA, 73 nt, Homo sapiens
gcucccuucaacuuuaacauggaagugcuuucugugacuuuaaaaguaagugcuuccauguuuuaguaggagu

SEQ ID NO: 1666 - RNA, 68 nt, Homo sapiens
ccuuugcuuuaacauggggguaccugcugugugaaacaaaaguaagugcuuccauguuucaguggagg

SEQ ID NO: 1667 - RNA, 65 nt, Homo sapiens
cuugaauccuuggaaccuaggugugagugcuauuucagugcaacacaccuauucaaggauucaaa

SEQ ID NO: 1668 - RNA, 69 nt, Homo sapiens
gggauacucaaaaugggggcgcuuuccuuuuugucuguacugggaagugcuucgauuuugggguguccc

SEQ ID NO: 1669 - RNA, 72 nt, Homo sapiens
uacaucggccauuauaauacaaccugauaaguguuauagcacuuaucagauuguauuguaauugucugugua

SEQ ID NO: 1670 - RNA, 68 nt, Homo sapiens
uaaaagguagauucuccuucuaugaguacauuauuuaugauuaaucauagaggaaaauccacguuuuc

SEQ ID NO: 1671 - RNA, 80 nt, Homo sapiens
gguauuuaaaagguagauuuuccuucuaugguuacguguuugaugguuaaucauagaggaaaauccacguuuucaguauc

SEQ ID NO: 1672 - RNA, 66 nt, Homo sapiens
agggcuccugacuccagguccuguguguuaccuagaaauagcacuggacuuggagucagaaggccu

SEQ ID NO: 1673 - RNA, 79 nt, Homo sapiens
ugguacucggggagagguuacccgagcaacuuugcaucuggacgacgaauguugcucggugaaccccuuuucgguauca

SEQ ID NO: 1674 - RNA, 83 nt, Homo sapiens
cgccggccgaugggcgucuuaccagacaugguuagaccuggcccucugucuaauacugucugguaaaaccguccauccgcugc

SEQ ID NO: 1675 - RNA, 68 nt, Homo sapiens
cccucgucuuacccagcaguguuugggugcgguugggagucucuaauacugccggguaaugauggagg

SEQ ID NO: 1676 - RNA, 94 nt, Homo sapiens
ugacuccuccaggucuuggaguaggucauuggguggauccucuauuuccuuacgugggccacuggauggcuccuccaugucuuggaguagauca

SEQ ID NO: 1677 - RNA, 111 nt, Homo sapiens
gccgggagguugaacauccugcauagugcugccaggaaaucccuauuucauauaagagggggcuggcugguugcauauguaggaugucccaucucccagcccacuucguca

SEQ ID NO: 1678 - RNA, 91 nt, Homo sapiens
aaacgauacuaaacuguuuuugcgauguguuccuaauaugcacuauaaauauauugggaacauuuugcauguauaguuuuguaucaauaua

SEQ ID NO: 1679 - RNA, 100 nt, Homo sapiens
ccaaagaaagaugcuaaacuauuuuugcgauguguuccuaauauguaauauaaauguauuggggacauuuugcauucauaguuuuguaucaauaauaugg

SEQ ID NO: 1680 - RNA, 72 nt, Homo sapiens
cuugggaauggcaaggaaaccguuaccauuacugaguuuaguaaugguaaugguucucuugcuauacccaga

SEQ ID NO: 1681 - RNA, 85 nt, Homo sapiens
gcuaagcacuuacaacuguuugcagaggaaacugagacuuuguaacuaugucucagucucaucugcaaagaaguaagugcuuugc

SEQ ID NO: 1682 - RNA, 84 nt, Homo sapiens
uugguacuuggagagugguuaucccuguccuguucguuuugcucaugucgaaucguacagggucauccacuuuuucaguaucaa

SEQ ID NO: 1683 - RNA, 84 nt, Homo sapiens
guggcagcuugguggucguaugugugacgccauuuacuugaaccuuuaggagugacaucacauauacggcagcuaaacugcuac

SEQ ID NO: 1684 - RNA, 58 nt, Homo sapiens
cuacucuggagagugacaaucauguauaauuaaauuugauugacacuucugugaguag

SEQ ID NO: 1685 - RNA, 58 nt, Homo sapiens
cuacucuggagagugacaaucauguauaacuaaauuugauugacacuucugugaguag

SEQ ID NO: 1686 - RNA, 58 nt, Homo sapiens; identical to SEQ ID NO: 1685

SEQ ID NO: 1687 - RNA, 101 nt, Homo sapiens
gcgagaagaucucaugcugugacucucuggagggaagcacuuucuguugucugaaagaaaacaaagcgcuucucuuuagaguguuacgguuugagaaaagc

SEQ ID NO: 1688 - RNA, 87 nt, Homo sapiens
ucucaugcugugacccuacaaagggaagcacuuucucuuguccaaaggaaaagaaggcgcuucccuuuggaguguuacgguuugaga

SEQ ID NO: 1689 - RNA, 97 nt, Homo sapiens
cagaucucagacaucucggggaucaucaugucacgagauaccagugugcacuugugacagauugauaacugaaaggucugggagccacucaucuuca

SEQ ID NO: 1690 - RNA, 91 nt, Homo sapiens
auuuucaucaccuagggaucuuguuaaaaagcagauucugauucagggaccaagauucugcauuuuuagcaaguucucaagugaugcuaau

SEQ ID NO: 1691 - RNA, 106 nt, Homo sapiens
cccagccuggcacauuaguaggccucaguaaauguuuauuagaugaauaaaugaaugacucaucagcaaacauuuauugugugccugcuaaagugagcuccacagg

SEQ ID NO: 1692 - RNA, 97 nt, Homo sapiens
ugaugcuuugcuggcuggugcagugccugagggaguaagagcccuguuguuguaagauagugucuuacucccucaggcacaucuccaacaagucucu

SEQ ID NO: 1693 - RNA, 97 nt, Homo sapiens
ugaugcuuugcuggcuggugcagugccugagggaguaagagcccuguuguugucagauagugucuuacucccucaggcacaucuccagcgagucucu

SEQ ID NO: 1694 - RNA, 96 nt, Homo sapiens
aaccauucaaauauaccacaguuuguuuaaccuuuugccuguugguugaagaugccuuucaacaggugacugguuagacaaacugugguauauaca

SEQ ID NO: 1695 - RNA, 77 nt, Homo sapiens
agcacggccucuccgaagccugcccggcuccucgggaaccugccucccgcauggcagcugcugcccuucggaggccg

SEQ ID NO: 1696 - RNA, 79 nt, Homo sapiens
ugcaugaguucgucuuggucuaggauuguuggaggagucagaaaaacuaccccagggauccugaaguccuuugggugga

SEQ ID NO: 1697 - RNA, 100 nt, Homo sapiens
gggccaaggugggccaggggugguguugggacagcuccguuuaaaaaggcaucuccaagagcuuccaucaaaggcugccucuuggugcagcacagguaga

SEQ ID NO: 1698 - RNA, 95 nt, Homo sapiens
ugcucggcuguuccuaggguguuucucucaucucuggucuauaauggguuaaauaguagagaugagggcaacacccuaggaacagcagaggaacc

SEQ ID NO: 1699 - RNA, 97 nt, Homo sapiens
caucauaaggagccuagacuucccauuugaagguggccauuuccuaccaccuucaaaugguaaguccaggcuccuucugauucaauaaaugaggagc

SEQ ID NO: 1700 - RNA, 97 nt, Homo sapiens
uacuuauuacugguagugagucucuaagaaaagaggaggugguuguuuuccuccucuuuucuuugagacucacuaccaauaauaagaaauacuacua

SEQ ID NO: 1701 - RNA, 94 nt, Homo sapiens
cgccuccuaccgcagugcuugacgggaggcggagcggggaacgaggccgucggccauuuugugucugcuuccugugggacguggugguagccgu

SEQ ID NO: 1702 - RNA, 94 nt, Homo sapiens
uuuuuuuuuaguauuuuuccaucaguguucauaaggaauguugcucuguaguuuucuuauaguguggcuuucuuagagcaaagaugguucccua

SEQ ID NO: 1703 - RNA, 97 nt, Homo sapiens
uaccgacccucgauuugguucaggaccuucccugaaccaaggaagagucacagucucuuccuugguucagggaggguccccaacaauguccucaugg

SEQ ID NO: 1704 - RNA, 118 nt, Homo sapiens
gccuuggugcugauuccugggcucugaccugagaccucuggguucugagcugugauguugcucucgagcugggaucuccggggucuugguucagggccggggccucuggguuccaagc

SEQ ID NO: 1705 - RNA, 96 nt, Homo sapiens
caaaaagggcuucugucgugaguggcacacguagggcaacucgauugcucugcgugcggaaucgacaucaagagauuucggaagcauaauuuuuug

SEQ ID NO: 1706 - RNA, 87 nt, Homo sapiens
accgcagggaaaaugagggacuuuugggggcagauguguuuccauuccacuaucauaaugccccuaaaaauccuuauugcucuugca

SEQ ID NO: 1707 - RNA, 111 nt, Homo sapiens
agaguguucaaggacagcaagaaaaaugagggacuuucaggggcagcuguguuuucugacucagucauaaugccccuaaaaauccuuauuguucuugcagugugcaucggg

SEQ ID NO: 1708 - RNA, 72 nt, Homo sapiens
ggagcuuaucagaaucuccagggguacuuuauaauuucaaaaagucccccaggugugauucugauuugcuuc

SEQ ID NO: 1709 - RNA, 93 nt, Mus musculus
augucagcggugccuuagcagcacguaaauauuggcguuaagauucugaaauuaccuccaguauugacugugcugcugaaguaagguuggcaa

SEQ ID NO: 1710 - RNA, 95 nt, Mus musculus
caugcuuguuccacucuagcagcacguaaauauuggcguagugaaauaaauauuaaacaccaauauuauugugcugcuuuagugugacagggaua

SEQ ID NO: 1711 - RNA, 95 nt, Rattus norvegicus
cauacuuguuccgcucuagcagcacguaaauauuggcguagugaaauaaauauuaaacaccaauauuauugugcugcuuuagugugacagggaua

SEQ ID NO: 1712 - RNA, 89 nt, Ateles geoffroyi; identical to SEQ ID NO: 1544

SEQ ID NO: 1713 - RNA, 89 nt, Lagothrix lagotricha
gucagcagugccuuagcagcacguaaauauuggcgcuaagauucuaaaauuaucuccaguauuaacugugcugcugaaguaagguuggc

SEQ ID NO: 1714 - RNA, 89 nt, Saguinus labiatus; identical to SEQ ID NO: 1544

SEQ ID NO: 1715 - RNA, 89 nt, Macaca mulatta; identical to SEQ ID NO: 1544

SEQ ID NO: 1716 - RNA, 81 nt, Macaca mulatta
guuccacucuagcagcacguaaauauuggcguagugaaauauguauuaaacaccaauauuacugugcugcuucagugugac

SEQ ID NO: 1717 - RNA, 89 nt, Macaca nemestrina; identical to SEQ ID NO: 1544

SEQ ID NO: 1718 - RNA, 89 nt, Gorilla gorilla; identical to SEQ ID NO: 1544

SEQ ID NO: 1719 - RNA, 89 nt, Pan paniscus; identical to SEQ ID NO: 1544

SEQ ID NO: 1720 - RNA, 89 nt, Pan troglodytes; identical to SEQ ID NO: 1544

SEQ ID NO: 1721 - RNA, 89 nt, Pongo pygmaeus; identical to SEQ ID NO: 1544

SEQ ID NO: 1722 - RNA, 74 nt, Lemur catta
gucagcagugccuuagcagcacguaaauauugguguuaagauucuaaaauuaucucuaaguauuaacugugccg

SEQ ID NO: 1723 - RNA, 65 nt, Canis familiaris
uagcagcacguaaauauuggcguuaagauucuaaaauuaucuccaguauuaacugugcugcugaa

SEQ ID NO: 1724 - RNA, 65 nt, Canis familiaris
uagcagcacguaaauauuggcguagugaaauaaaaauuaaacaccaauauuauugugcugcuuua

SEQ ID NO: 1725 - RNA, 90 nt, Monodelphis domestica
gucaacagugccuuagcagcacguaaauauuggcguuaagauuuuaaaaguaucuccaguauuaacugugcugcugaaguaagguuggcc

SEQ ID NO: 1726 - RNA, 84 nt, Gallus gallus
gucugucauacucuagcagcacguaaauauugguguuaaaacuguaaauaucuccaguauuaacugugcugcugaaguaaggcu

SEQ ID NO: 1727 - RNA, 94 nt, Gallus gallus
ccuacuuguuccgcccuagcagcacguaaauauugguguaguaaaauaaaccuuaaaccccaauauuauugugcugcuuaagcguggcagagau

SEQ ID NO: 1728 - RNA, 82 nt, Xenopus tropicalis
gccagcaguccuuuagcagcacguaaauauugguguuaaaauggucccaauauuaacugugcugcuagaguaagguuggccu

SEQ ID NO: 1729 - RNA, 84 nt, Xenopus tropicalis
aauugcuccgcauuagcagcacguaaauauugggugauaugauauggagccccaguauuauuguacugcuuaaguguggcaagg

SEQ ID NO: 1730 - RNA, 93 nt, Bos taurus
cauacuuguuccgcuguagcagcacguaaauauuggcguaguaaaauaaauauuaaacaccaauauuauugugcugcuuuagcgugacaggga

SEQ ID NO: 1731 - RNA, 87 nt, Danio rerio
ccuuccucgcuuuagcagcacguaaauauugguguguuauagucaaggccaaccccaauauuaugugugcugcuucaguaaggcagg

SEQ ID NO: 1732 - RNA, 140 nt, Danio rerio
ccugaacuuggccgugugacagacuggcugccuggcuguagcagcacguaaauauuggagucaaagcacuugcgaauccuccaguauugaccgugcugcuggaguuaggcgggccguuuaccgucugcgggggccucggg

SEQ ID NO: 1733 - RNA, 136 nt, Danio rerio
gagguugugugugugugcguguguugucuugcuuuagcagcauguaaauauuggaguuacuccuuggccaaugccuccaauauugcucgugcugcugaagcaagaagucaccaagcagcacaugcacgucauccuu

SEQ ID NO: 1734 - RNA, 89 nt, Fugu rubripes
gccacugugcuguagcagcacguaaauauuggaguuaaggcucucugugauaccuccaguauugaucgugcugcugaagcaaagaugac

SEQ ID NO: 1735 - RNA, 72 nt, Tetraodon nigroviridis
uagcagcacguaaauauuggaguuaaggcucucugugauaccuccaguauugaucgugcugcugaagcaaag

SEQ ID NO: 1736 - RNA, 94 nt, Mus musculus
acacccaacucuccuggcucuagcagcacagaaauauuggcauggggaagugagucugccaauauuggcugugcugcuccaggcagggugguga

SEQ ID NO: 1737 - RNA, 87 nt, Rattus norvegicus
aacucuccuggcucuagcagcacagaaauauuggcacggguaagugagucugccaauauuggcugugcugcuccaggcaggguggug

SEQ ID NO: 1738 - RNA, 87 nt, Macaca mulatta
agcuucccuggcucuagcagcacagaaauauuggcacagggaagcaagucugccaauauuggcugugcugcuccaggcaggguggug

SEQ ID NO: 1739 - RNA, 87 nt, Gorilla gorilla
agcuuccugggcucuagcagcacagaaauauuggcacagggaagcgagucugccaauauuggcugugcugcuccaggcaggguggug

SEQ ID NO: 1740 - RNA, 87 nt, Pan paniscus; identical to SEQ ID NO: 1546

SEQ ID NO: 1741 - RNA, 61 nt, Canis familiaris
uagcagcacagaaauauuggcacugggaagagagucugccaauauuggcugugcugcucua

SEQ ID NO: 1742 - RNA, 87 nt, Bos taurus
agcuccccuggcucuagcagcacagaaauauuggcacugggaagaaagccugccaauauuggcugugcugcuccaggcaggguggug

SEQ ID NO: 1743 - RNA, 84 nt, Rattus norvegicus
gucaggauaaugucaaagugcuuacagugcagguaguggugugugcaucuacugcagugaaggcacuuguggcauugugcugac

SEQ ID NO: 1744 - RNA, 78 nt, Rattus norvegicus
uuggccaugucaaagugcuuacagugcagguagcuucuugagaucuacugcacugcaagcacuucuuacauuaccaug

SEQ ID NO: 1745 - RNA, 84 nt, Ateles geoffroyi; identical to SEQ ID NO: 1547

SEQ ID NO: 1746 - RNA, 84 nt, Lagothrix lagotricha; identical to SEQ ID NO: 1547

SEQ ID NO: 1747 - RNA, 84 nt, Saguinus labiatus; identical to SEQ ID NO: 1547

SEQ ID NO: 1748 - RNA, 84 nt, Macaca mulatta; identical to SEQ ID NO: 1547

SEQ ID NO: 1749 - RNA, 84 nt, Macaca nemestrina; identical to SEQ ID NO: 1547

SEQ ID NO: 1750 - RNA, 84 nt, Gorilla gorilla; identical to SEQ ID NO: 1547

SEQ ID NO: 1751 - RNA, 84 nt, Pan paniscus; identical to SEQ ID NO: 1547

SEQ ID NO: 1752 - RNA, 84 nt, Pan troglodytes; identical to SEQ ID NO: 1547

SEQ ID NO: 1753 - RNA, 84 nt, Pongo pygmaeus
gucagaauaaugucaaagugcuuacagugcagguagugauacgugcaucuacugcagugaaggcacuuguagcauuauggugac

SEQ ID NO: 1754 - RNA, 84 nt, Lemur catta; identical to SEQ ID NO: 1547

SEQ ID NO: 1755 - RNA, 85 nt, Monodelphis domestica
gucagaauaaugucaaagugcuuacagugcagguagugauauguagaaucuacugcagugaaggcacuuguagcauuauagugac

SEQ ID NO: 1756 - RNA, 85 nt, Gallus gallus
gucagaguaaugucaaagugcuuacagugcagguagugauauauagaaccuacugcagugaaggcacuuguagcauuauguugac

SEQ ID NO: 1757 - RNA, 87 nt, Xenopus tropicalis
gucaagaguaaugucaaagugcuuacagugcagguagugauuuaacagaaccuacugcagugaaggcacuuguagcauuauauugac

SEQ ID NO: 1758 - RNA, 84 nt, Bos taurus; identical to SEQ ID NO: 1547

SEQ ID NO: 1759 - RNA, 96 nt, Mus musculus
ugcgugcuuuuuguucuaaggugcaucuagugcagauagugaaguagacuagcaucuacugcccuaagugcuccuucuggcauaagaaguuauguc

SEQ ID NO: 1760 - RNA, 96 nt, Rattus norvegicus; identical to SEQ ID NO: 1759

SEQ ID NO: 1761 - RNA, 71 nt, Ateles geoffroyi; identical to SEQ ID NO: 1548

SEQ ID NO: 1762 - RNA, 71 nt, Lagothrix lagotricha; identical to SEQ ID NO: 1548

SEQ ID NO: 1763 - RNA, 71 nt, Saguinus labiatus; identical to SEQ ID NO: 1548

SEQ ID NO: 1764 - RNA, 71 nt, Macaca mulatta; identical to SEQ ID NO: 1548

SEQ ID NO: 1765 - RNA, 71 nt, Macaca nemestrina; identical to SEQ ID NO: 1548

SEQ ID NO: 1766 - RNA, 71 nt, Gorilla gorilla; identical to SEQ ID NO: 1548

SEQ ID NO: 1767 - RNA, 71 nt, Pan paniscus; identical to SEQ ID NO: 1548

SEQ ID NO: 1768 - RNA, 71 nt, Pan troglodytes; identical to SEQ ID NO: 1548

SEQ ID NO: 1769 - RNA, 71 nt, Pongo pygmaeus; identical to SEQ ID NO: 1548

SEQ ID NO: 1770 - RNA, 71 nt, Lemur catta; identical to SEQ ID NO: 1548

SEQ ID NO: 1771 - RNA, 72 nt, Monodelphis domestica
uuguucuaaggugcaucuagugcagauagugaaguagauuagcaucuacugcccuaagugcuccuucuggca

SEQ ID NO: 1772 - RNA, 93 nt, Gallus gallus
gugcuuuuuguacuaaggugcaucuagugcagauagugaaguagauuagcaucuacugcccuaagugcuccuucuggcauaagaaguuauguc

SEQ ID NO: 1773 - RNA, 87 nt, Xenopus tropicalis
gugcuuuuuguccuaaggugcaucuagugcagauagugaaguagauuagcaucuacugcccuaagugcuccuucuggcauaaaaagu

SEQ ID NO: 1774 - RNA, 71 nt, Bos taurus; identical to SEQ ID NO: 1548

SEQ ID NO: 1775 - RNA, 92 nt, Sus scrofa
gugcuuuuuguucuaaggugcaucuagugcagauagugaaguagauuagcaucuacugcccuaagugcuccuucuggcauaagaaguuaugu

SEQ ID NO: 1776 - RNA, 83 nt, Danio rerio
ggcuuugugcuaaggugcaucuagugcagauagugaaguagacuagcaccuacugcccuaagugcuccuucuggcacgagggu

SEQ ID NO: 1777 - RNA, 85 nt, Danio rerio
gccuuccugcuaaggugcaucuuguguaguuagugaaguagucuaguaucuacugcgcuagauguuccuuuuggcaggaguagcu

SEQ ID NO: 1778 - RNA, 76 nt, Fugu rubripes
uugugcuaaggugcaucuagugcagauagugaaauagacuagcaccuacugcccuaagugcuccuucuggcauaag

SEQ ID NO: 1779 - RNA, 76 nt, Tetraodon nigroviridis; identical to SEQ ID NO: 1778

SEQ ID NO: 1780 - RNA, 83 nt, Mus musculus
ucucuuguguuaaggugcaucuagugcuguuagugaagcagcuuacaaucuacugcccuaaaugccccuucucgcacaggcua

SEQ ID NO: 1781 - RNA, 71 nt, Macaca mulatta; identical to SEQ ID NO: 1549

SEQ ID NO: 1782 - RNA, 84 nt, Gallus gallus
cgugguccuuguguuaaggugcaucuagugcaguuagugacguagcguagaaucuacugcccuaaaugcuccuucuggcacaag

SEQ ID NO: 1783 - RNA, 78 nt, Xenopus tropicalis
ccuuguguuaaggugcaucuagugcaguuagugacauaguguagcaucuacugcccuaaaugcuccuuuuggcacagg

SEQ ID NO: 1784 - RNA, 75 nt, Bos taurus
cuuguguuaaggugcaucuagugcaguuagugaagcagcucagaaucuacugcccuaaaugcuccuucuggcaca

SEQ ID NO: 1785 - RNA, 87 nt, Danio rerio
uacugcuuaugcuaaggugcauuuagugcagauagugaaauagacuagcaccuacugcccuaagugccccuucuggcauaaggggcu

SEQ ID NO: 1786 - RNA, 80 nt, Mus musculus
ccuaguagugccaaagugcucauagugcagguaguuuuuauaccacucuacugcagugugagcacuucuaguacuccugg

SEQ ID NO: 1787 - RNA, 85 nt, Rattus norvegicus
cagcuucuguagcacuaaagugcuuauagugcagguagugugucgucaucuacugcauuacgagcacuuacaguacugccagcug

SEQ ID NO: 1788 - RNA, 71 nt, Ateles geoffroyi
guagcacuaaagugcuuauagugcagguaguguuuaguuaucuacugcauuaugagcacuuaaaguacugc

SEQ ID NO: 1789 - RNA, 71 nt, Lagothrix lagotricha; identical to SEQ ID NO: 1788

SEQ ID NO: 1790 - RNA, 71 nt, Saguinus labiatus; identical to SEQ ID NO: 1788

SEQ ID NO: 1791 - RNA, 71 nt, Macaca mulatta; identical to SEQ ID NO: 1788

SEQ ID NO: 1792 - RNA, 69 nt, Macaca mulatta
aguaccaaagugcucauagugcagguaguuuuggcaugacucuacuguagugugggcacuuccaguacu

SEQ ID NO: 1793 - RNA, 71 nt, Macaca nemestrina; identical to SEQ ID NO: 1788

SEQ ID NO: 1794 - RNA, 71 nt, Gorilla gorilla; identical to SEQ ID NO: 1788

SEQ ID NO: 1795 - RNA, 71 nt, Pan paniscus; identical to SEQ ID NO: 1788

SEQ ID NO: 1796 - RNA, 71 nt, Pan troglodytes; identical to SEQ ID NO: 1788

SEQ ID NO: 1797 - RNA, 71 nt, Pongo pygmaeus; identical to SEQ ID NO: 1788

SEQ ID NO: 1798 - RNA, 71 nt, Lemur catta
guagcacuaaagugcuuauagugcagguaguguuuaguuaucuacugcaucaugagcacuuaaaguacugc

SEQ ID NO: 1799 - RNA, 59 nt, Canis familiaris
uaaagugcuuauagugcagguaguguuucguuaucuacugcauuaugagcacuuaaagu

SEQ ID NO: 1800 - RNA, 102 nt, Monodelphis domestica
ugaaaggacagcuuuuguagcacuaaagugcuuauagugcagguaguguuuaguuaucuacugcauuaugagcacuugaaguacugcuagcuguagaacuac

SEQ ID NO: 1801 - RNA, 98 nt, Gallus gallus
ugacagcucuuguagcacuaaagugcuuauagugcagguaguguucacuaaucuacugcauuauaagcacuuaaaguacugcuagcuguagaacuaca

SEQ ID NO: 1802 - RNA, 85 nt, Gallus gallus
cuagcaguaucaaagugcucauagugcagguagcuuggcauuggaccuacuguaaugugggcacuuacaguacuguuagauaaag

SEQ ID NO: 1803 - RNA, 74 nt, Xenopus laevis
gcaguuccaaagugcucauagugcagguaguuguauucauguucuacuguaauaugggcacuuacaguacugcu

SEQ ID NO: 1804 - RNA, 84 nt, Xenopus tropicalis
gcuaaaguggugcuaaagugcuuauagugcagguaguuuuucuguauucuacugcauaaugagcacuuaaaguacuccuagcug

SEQ ID NO: 1805 - RNA, 74 nt, Xenopus tropicalis
gcaguuccaaagugcucauagugcagguaguuguauugauguucuacuguaauaugggcacuuacaguacugcu

SEQ ID NO: 1806 - RNA, 71 nt, Bos taurus; identical to SEQ ID NO: 1788

SEQ ID NO: 1807 - RNA, 69 nt, Bos taurus
aguaccaaagugcucacagugcagguaguuuuggcagcgcucuacuguagugugggcacuuccaguacu

SEQ ID NO: 1808 - RNA, 71 nt, Sus scrofa; identical to SEQ ID NO: 1788

SEQ ID NO: 1809 - RNA, 153 nt, Danio rerio
ucuuaaauaaaucuccuaauguugcaguuguguuagaguuucagcagugcuaaagugcuuauagugcagguaguauuucugucaucuacugcagugugagcacuugaaguacuucuagcuuaaugcgucugggauccgaagauuucugcuaga

SEQ ID NO: 1810 - RNA, 94 nt, Danio rerio
gaguuuguccuggcaguuccaaagugcucacagugcagguagugccaguggaucuacugcaaugucugcacuucaaguauugccggacgccuuc

SEQ ID NO: 1811 - RNA, 80 nt, Fugu rubripes
agcaguauuaaagugcuuauagugcagguaguuacugauggucuacugcagugugagcacuucuaguacuucuagaugca

SEQ ID NO: 1812 - RNA, 73 nt, Tetraodon nigroviridis
gcaguauuaaagugcuuauagugcagguaguuuucucagggucuacugcaguaugagcacuucuaguacuucu

SEQ ID NO: 1813 - RNA, 92 nt, Mus musculus
uguaccaccuugucggauagcuuaucagacugauguugacuguugaaucucauggcaacagcagucgaugggcugucugacauuuugguauc

SEQ ID NO: 1814 - RNA, 92 nt, Rattus norvegicus
uguaccaccuugucggguagcuuaucagacugauguugacuguugaaucucauggcaacagcagucgaugggcugucugacauuuugguauc

SEQ ID NO: 1815 - RNA, 92 nt, Cricetulus griseus; identical to SEQ ID NO: 1814

SEQ ID NO: 1816 - RNA, 72 nt, Ateles geoffroyi; identical to SEQ ID NO: 1551

SEQ ID NO: 1817 - RNA, 72 nt, Macaca mulatta; identical to SEQ ID NO: 1551

SEQ ID NO: 1818 - RNA, 72 nt, Macaca nemestrina; identical to SEQ ID NO: 1551

SEQ ID NO: 1819 - RNA, 72 nt, Gorilla gorilla; identical to SEQ ID NO: 1551

SEQ ID NO: 1820 - RNA, 72 nt, Pan paniscus; identical to SEQ ID NO: 1551

SEQ ID NO: 1821 - RNA, 72 nt, Pan troglodytes; identical to SEQ ID NO: 1551

SEQ ID NO: 1822 - RNA, 72 nt, Pongo pygmaeus; identical to SEQ ID NO: 1551

SEQ ID NO: 1823 - RNA, 60 nt, Canis familiaris
uagcuuaucagacugauguugacuguugaaucucauggcaacagcagucgaugggcuguc

SEQ ID NO: 1824 - RNA, 74 nt, Monodelphis domestica
ugucggauagcuuaucagacugauguugacuguuggaucucauggcaacagcagucgaugagcugucugacauu

SEQ ID NO: 1825 - RNA, 97 nt, Gallus gallus
uguaccauccugucggauagcuuaucagacugauguugacuguuggaucucauggcaacaacagucgguaggcugucugacauuuugguaucucuca

SEQ ID NO: 1826 - RNA, 72 nt, Bos taurus
ugucggguagcuuaucagacugauguugacuguugaaucucauggcaacagcagucgaugggcugucugaca

SEQ ID NO: 1827 - RNA, 92 nt, Sus scrofa; identical to SEQ ID NO: 1814

SEQ ID NO: 1828 - RNA, 148 nt, Danio rerio
uuaugugucuuuauuggcguggauauaagucuuucccagugugucagauagcuuaucagacugguguuggcuguuacauucgcccggcgacaacagucuguaggcugucugacauuuugggcauuuucuucuccgauuaaaaauauga

SEQ ID NO: 1829 - RNA, 127 nt, Danio rerio
agacagacaguaaaagugucccuuucugucauguagcuuaucagacugguguuggcuuugaguuuuuggcaacagcagucuaauaggcugucugacauuuugggcuuauucgacguacgguuuguuu

SEQ ID NO: 1830 - RNA, 73 nt, Fugu rubripes
ugucaaauagcuuaucagacugguguuggcuguuaagauugcaaggcgacaacagucuguaggcugucugaca

SEQ ID NO: 1831 - RNA, 122 nt, Tetraodon nigroviridis
auugucgucuuuacaucugucacucucggccugucaaauagcuuaucagacugguguuggcuguuaagauugcaaggcgacaacagucugaaggcugucugacauuucgggcucuuucaucu

SEQ ID NO: 1832 - RNA, 68 nt, Mus musculus
cuccggugccuacugagcugauaucaguucucauuucacacacuggcucaguucagcaggaacaggag

SEQ ID NO: 1833 - RNA, 107 nt, Mus musculus
gccucucuccgggcuccgccucccgugccuacugagcugaaacaguugauuccagugcacuggcucaguucagcaggaacaggaguccagcccccuaggagcuggca

SEQ ID NO: 1834 - RNA, 68 nt, Rattus norvegicus; identical to SEQ ID NO: 1832

SEQ ID NO: 1835 - RNA, 108 nt, Rattus norvegicus
gccucucccugggcuccgccuccugugccuacugagcugaaacaguugauuccagugcacuggcucaguucagcaggaacaggaguccagcccccauaggagcuggca

SEQ ID NO: 1836 - RNA, 68 nt, Macaca mulatta; identical to SEQ ID NO: 1552

SEQ ID NO: 1837 - RNA, 73 nt, Macaca mulatta
cucugccucccgugccuacugagcugaaacacaguugguuugugcacacuggcucaguucagcaggaacagga

SEQ ID NO: 1838 - RNA, 68 nt, Macaca nemestrina; identical to SEQ ID NO: 1552

SEQ ID NO: 1839 - RNA, 73 nt, Macaca nemestrina; identical to SEQ ID NO: 1837

SEQ ID NO: 1840 - RNA, 73 nt, Gorilla gorilla; identical to SEQ ID NO: 1553

SEQ ID NO: 1841 - RNA, 68 nt, Pan paniscus; identical to SEQ ID NO: 1552

SEQ ID NO: 1842 - RNA, 73 nt, Pan paniscus; identical to SEQ ID NO: 1553

SEQ ID NO: 1843 - RNA, 73 nt, Pan troglodytes; identical to SEQ ID NO: 1553

SEQ ID NO: 1844 - RNA, 68 nt, Pongo pygmaeus; identical to SEQ ID NO: 1552

SEQ ID NO: 1845 - RNA, 73 nt, Pongo pygmaeus; identical to SEQ ID NO: 1553

SEQ ID NO: 1846 - RNA, 62 nt, Canis familiaris
ggugccuacugagcugauaucaguucucauuguacacacuggcucaguucagcaggaacagg

SEQ ID NO: 1847 - RNA, 62 nt, Canis familiaris
cgugccuacugagcugaaacacaguugauuugugcagacuggcucaguucagcaggaacagg

SEQ ID NO: 1848 - RNA, 57 nt, Monodelphis domestica
ggugccuacugagcugauaacaguucugauuuuacacacuggcucaguucagcagga

SEQ ID NO: 1849 - RNA, 73 nt, Monodelphis domestica
gccuccugugccuacugagcugaaacacaguugcuuuggauaaacuggcucaguucagcaggaacaggagucu

SEQ ID NO: 1850 - RNA, 68 nt, Gallus gallus
cuccggugccuacugagcugauaucaguucugauuuuacauacuggcucaguucagcaggaacaggag

SEQ ID NO: 1851 - RNA, 68 nt, Xenopus tropicalis
cucccguaccuacugggcugauaaucagugguuauaucuuccccuggcucaguucagcaggacaggag

SEQ ID NO: 1852 - RNA, 72 nt, Bos taurus
cucugccucccgugccuacugagcugaaacacaguugauuugugcacacuggcucaguucagcaggaacagg

SEQ ID NO: 1853 - RNA, 72 nt, Sus scrofa
cucugccucccgugccuacugagcugaaacacaguugauuugugcagacuggcucaguucagcaggaacagg

SEQ ID NO: 1854 - RNA, 80 nt, Danio rerio
accugagcuccggugccuucugagcugauaucaguuguaguaaaucacuggcucaguucagcaggaacaggaguguggcc

SEQ ID NO: 1855 - RNA, 82 nt, Danio rerio
gggcuggucuccugugccugcugugcugauaaucaguggacggcugugacuggcucaguucagcaggaacaggggccugguc

SEQ ID NO: 1856 - RNA, 142 nt, Danio rerio
gcugaacgggagucauaugagagauagauggagcuggccucccgugccuacugagcugauuacaguacugugcaaacacuggcucaguucagcaggaacaggagucugguccacaaacuccaccaaacacugcugcuucagc

SEQ ID NO: 1857 - RNA, 90 nt, Danio rerio
gagggcuguucccacuugugccugcuaaacugguaucaguauguugauuuagugcuggcucaguucagcaggaacaggugugaaguccuc

SEQ ID NO: 1858 - RNA, 79 nt, Fugu rubripes
ggguugugcccuccugugccuacugaacugguaucagugucauacuggaaaacuggcucaguucagcaggaacaggagu

SEQ ID NO: 1859 - RNA, 82 nt, Fugu rubripes
gggucagucuccugugccugcugugcugauaaucagugugugacguuggcuggcucaguucagcaggaacaggggacugguc

SEQ ID NO: 1860 - RNA, 70 nt, Tetraodon nigroviridis
cuuccugugccuacugagcugauaugcaguuguacagaaccacuggcucaguucagcaggaacaggaguc

SEQ ID NO: 1861 - RNA, 80 nt, Tetraodon nigroviridis
gggucagucuccugugccugcugugcugauaaucagugugugacguuggcuggcucaguucagcaggaacaggggacugg

SEQ ID NO: 1862 - RNA, 84 nt, Mus musculus; identical to SEQ ID NO: 1554

SEQ ID NO: 1863 - RNA, 84 nt, Rattus norvegicus
ggccaguguugagaggcggagacacgggcaauugcuggacgcugcccugggcauugcacuugucucggucugacagugccggcc

SEQ ID NO: 1864 - RNA, 84 nt, Lagothrix lagotricha; identical to SEQ ID NO: 1554

SEQ ID NO: 1865 - RNA, 84 nt, Macaca mulatta; identical to SEQ ID NO: 1554

SEQ ID NO: 1866 - RNA, 84 nt, Macaca nemestrina; identical to SEQ ID NO: 1554

SEQ ID NO: 1867 - RNA, 84 nt, Gorilla gorilla; identical to SEQ ID NO: 1554

SEQ ID NO: 1868 - RNA, 84 nt, Pan paniscus; identical to SEQ ID NO: 1554

SEQ ID NO: 1869 - RNA, 84 nt, Pan troglodytes
ggccaguguugagaggcggagacuugggcaauugcuggacgcugcccugggcauugcacuugucucggcugagacgcgcccgcc

SEQ ID NO: 1870 - RNA, 84 nt, Pongo pygmaeus; identical to SEQ ID NO: 1554

SEQ ID NO: 1871 - RNA, 59 nt, Canis familiaris
aggcggagacuugggcaauugcuggacgcugcccgcgcauugcacuugucucggucuga

SEQ ID NO: 1872 - RNA, 83 nt, Monodelphis domestica
ggccaguguugagaggcggagacuugggcaauugcugaacucugcccugggcauugcacuugucucggucugacagugcuggc

SEQ ID NO: 1873 - RNA, 82 nt, Xenopus tropicalis
gcugguguugacaggcagagacaggagcaacugcuggugugccuugguagcauugcacuugucucggucugacagugucggc

SEQ ID NO: 1874 - RNA, 82 nt, Xenopus tropicalis; identical to SEQ ID NO: 1873

SEQ ID NO: 1875 - RNA, 84 nt, Bos taurus
ggccaguguugagaggcggagacuugggcaauugcuggacgcugccccgggcauugcacuugucucggucugacagugccggcc

SEQ ID NO: 1876 - RNA, 82 nt, Danio rerio
gccggcgcugagaggcggagacuugggcagcugccgucauucccagaaggcauugcacuugucucggucugacaguggcggc

SEQ ID NO: 1877 - RNA, 82 nt, Fugu rubripes
gcugguguugagaggcggagacuugggcaauugccggccaucacagagggcauugcacuugucucggucugacagugccggc

SEQ ID NO: 1878 - RNA, 82 nt, Tetraodon nigroviridis; identical to SEQ ID NO: 1877

SEQ ID NO: 1879 - RNA, 70 nt, Mus musculus; identical to SEQ ID NO: 1555

SEQ ID NO: 1880 - RNA, 70 nt, Rattus norvegicus
ggggauauugcacauuacuaaguugcauguugucacggccucaaugcaauuuagugugugugauauucuc

SEQ ID NO: 1881 - RNA, 70 nt, Saguinus labiatus; identical to SEQ ID NO: 1555

SEQ ID NO: 1882 - RNA, 70 nt, Macaca mulatta; identical to SEQ ID NO: 1555

SEQ ID NO: 1883 - RNA, 70 nt, Macaca nemestrina; identical to SEQ ID NO: 1555

SEQ ID NO: 1884 - RNA, 70 nt, Gorilla gorilla; identical to SEQ ID NO: 1555

SEQ ID NO: 1885 - RNA, 70 nt, Pan paniscus; identical to SEQ ID NO: 1555

SEQ ID NO: 1886 - RNA, 70 nt, Pan troglodytes; identical to SEQ ID NO: 1555

SEQ ID NO: 1887 - RNA, 70 nt, Pongo pygmaeus; identical to SEQ ID NO: 1555

SEQ ID NO: 1888 - RNA, 62 nt, Canis familiaris
uauugcacauuacuaaguugcauguugucacggccucaaugcaauuuagugugugugauauu

SEQ ID NO: 1889 - RNA, 69 nt, Monodelphis domestica
ggagauauugcacauuacuaaguugcauguugucacggcuuuagugcaauuuaguaugugugauauuuu

SEQ ID NO: 1890 - RNA, 70 nt, Gallus gallus
ggagauauugcacauuacuaaguugcauguugucacggccucagugcaauuuagugugugcgauacuuuc

SEQ ID NO: 1891 - RNA, 70 nt, Sus scrofa
ggagauauugcacauuacuaaguugcauguugucacggccucagugcaauuuagugugugugauauuuuc

SEQ ID NO: 1892 - RNA, 85 nt, Mus musculus
ugcccgggacccaguucaaguaauucaggauagguuguggugcugaccagccuguucuccauuacuuggcucgggggccggugcc

SEQ ID NO: 1893 - RNA, 90 nt, Rattus norvegicus
aaggccguggccuuguucaaguaauccaggauaggcugugcaggucccaaggggccuauucuugguuacuugcacggggacgcgggccug

SEQ ID NO: 1894 - RNA, 85 nt, Rattus norvegicus
ugcccgggacccaguucaaguaauucaggauagguuguggugcuggccagccuguucuccauuacuuggcucgggggccggugcc

SEQ ID NO: 1895 - RNA, 77 nt, Lagothrix lagotricha
guggccucguucaaguaauccaggauaggcugugcaggucccaaugggccuauucuugguuacuugcacggggacgc

SEQ ID NO: 1896 - RNA, 77 nt, Macaca mulatta; identical to SEQ ID NO: 1895

SEQ ID NO: 1897 - RNA, 84 nt, Macaca mulatta
ggcuguggcuggauucaaguaauccaggauaggcuguuuccaucugugaggccuauucuugauuacuuguuucuggaggcagcu

SEQ ID NO: 1898 - RNA, 77 nt, Macaca mulatta; identical to SEQ ID NO: 1556

SEQ ID NO: 1899 - RNA, 77 nt, Macaca nemestrina
guggccucguucaaguaauccaggauaggcugugcaggucccaaugggccuauucuugauuacuugcacggggacgc

SEQ ID NO: 1900 - RNA, 77 nt, Gorilla gorilla; identical to SEQ ID NO: 1895

SEQ ID NO: 1901 - RNA, 77 nt, Pan paniscus; identical to SEQ ID NO: 1895

SEQ ID NO: 1902 - RNA, 77 nt, Pan troglodytes; identical to SEQ ID NO: 1895

SEQ ID NO: 1903 - RNA, 77 nt, Pongo pygmaeus; identical to SEQ ID NO: 1895

SEQ ID NO: 1904 - RNA, 61 nt, Canis familiaris
uucaaguaauccaggauaggcugugcaggucccaaugggccuauucuugguuacuugcacg

SEQ ID NO: 1905 - RNA, 60 nt, Canis familiaris
uucaaguaauccaggauaggcuguuuccgucugugaggccuauucuugauuacuuguuuc

SEQ ID NO: 1906 - RNA, 56 nt, Canis familiaris
uucaaguaauucaggauagguugugugcuguccagccuguucuccauuacuuggcu

SEQ ID NO: 1907 - RNA, 77 nt, Gallus gallus
gucaccugguucaaguaauccaggauaggcuguauccauuccugcuggccuauucuugguuacuugcacugggaggc

SEQ ID NO: 1908 - RNA, 85 nt, Xenopus tropicalis
ggcugcugccugguucaaguaauccaggauaggcuguuuccucaaagcacggccuacucuugauuacuuguuucaggaaguagcu

SEQ ID NO: 1909 - RNA, 80 nt, Xenopus tropicalis
ugggcgcucgcuucaaguaauccaggauaggcuguaaugucuccugucagccuuuucucgauuacuugggaccagagcca

SEQ ID NO: 1910 - RNA, 84 nt, Bos taurus; identical to SEQ ID NO: 1897

SEQ ID NO: 1911 - RNA, 85 nt, Bos taurus
ugcccgggacccaguucaaguaauucaggauagguugugugcuguccagccuguucuccauuacuuggcucgggggccggugccc

SEQ ID NO: 1912 - RNA, 84 nt, Sus scrofa; identical to SEQ ID NO: 1897

SEQ ID NO: 1913 - RNA, 78 nt, Danio rerio
uuuggccugguucaaguaauccaggauaggcuugugauguccggaaagccuauucgggaugacuugguucaggaauga

SEQ ID NO: 1914 - RNA, 128 nt, Danio rerio
guguggacuugagugcuggaagugguuguucccuuguucaaguaauccaggauaggcugucuguccuggaggccuauucaugauuacuugcacuagguggcagccguugcccuucauggaacucaugc

SEQ ID NO: 1915 - RNA, 137 nt, Danio rerio
cuaagcugauacugagucaguguguggcugcaaccugguucaaguaauccaggauaggcuuuguggacuaggguuggccuguucuugguuacuugcacuggguugcagcuacuaaacaacuaagaagaucagaagag

SEQ ID NO: 1916 - RNA, 97 nt, Danio rerio
gcauuuggccuuugccugguucaaguaauccaggauagguuaguucccacuaguacggccuauucuugguuacuuguuucaggaggaggcuacgagc

SEQ ID NO: 1917 - RNA, 88 nt, Fugu rubripes
aggccucggccugguucaaguaauccaggauaggcugguuaacccugcacggccuauucuugauuacuugugucaggaaguggccgug

SEQ ID NO: 1918 - RNA, 96 nt, Tetraodon nigroviridis
gcguuaggccucggccugguucaaguaauccaggauaggcugguuaacccugcacggccuauucuugauuacuugugucaggaaguggccgccagc

SEQ ID NO: 1919 - RNA, 82 nt, Rattus norvegicus
aagucugugucuguaaacauccccgacuggaagcuguaagccacagccaagcuuucagucagauguuugcugcuacuggcuc

SEQ ID NO: 1920 - RNA, 92 nt, Rattus norvegicus
gggcagucuuugcuacuguaaacauccuugacuggaagcuguaagguguugagaggagcuuucagucggauguuuacagcggcaggcugcca

SEQ ID NO: 1921 - RNA, 71 nt, Macaca mulatta
gcgacuguaaacauccucgacuggaagcugugaagccauagaugggcuuucagucggauguuugcagcugc

SEQ ID NO: 1922 - RNA, 71 nt, Gorilla gorilla; identical to SEQ ID NO: 1557

SEQ ID NO: 1923 - RNA, 71 nt, Pan paniscus; identical to SEQ ID NO: 1557

SEQ ID NO: 1924 - RNA, 71 nt, Pan troglodytes; identical to SEQ ID NO: 1557

SEQ ID NO: 1925 - RNA, 71 nt, Pongo pygmaeus; identical to SEQ ID NO: 1557

SEQ ID NO: 1926 - RNA, 64 nt, Canis familiaris
uguaaacauccuugacuggaagcuguaaggugcucagaggggcuuucagucggauguuuacagc

SEQ ID NO: 1927 - RNA, 72 nt, Gallus gallus
gcgacuguaaacauccucgacuggaagcugugaagcagcagauggggcuuucagucggauguuugcagcugc

SEQ ID NO: 1928 - RNA, 71 nt, Xenopus tropicalis
gcgacuguaaacauccucgacuggaagcugugaagcaguugaagggcuuucagucagauguuugcagcugc

SEQ ID NO: 1929 - RNA, 80 nt, Danio rerio
uacgggcuacuguaaacauccuugacuggaagcuggugcacaugauggagcuuucagucggauguuugcagcagccaacu

SEQ ID NO: 1930 - RNA, 102 nt, Mus musculus
ccagcugugaguaauucuuuggcagugucuuagcugguuguugugaguauuagcuaaggaagcaaucagcaaguauacugcccuagaagugcugcacauugu

SEQ ID NO: 1931 - RNA, 84 nt, Mus musculus
gugcucgguuuguaggcaguguaauuagcugauuguagugcggugcugacaaucacuaacuccacugccaucaaaacaaggcac

SEQ ID NO: 1932 - RNA, 102 nt, Rattus norvegicus
ccggcugugaguaauucuuuggcagugucuuagcugguuguugugaguauuagcuaaggaagcaaucagcaaguauacugcccuagaagugcugcacguugu

SEQ ID NO: 1933 - RNA, 77 nt, Rattus norvegicus
agucuaguuacuaggcaguguaguuagcugauugcuaauaguaccaaucacuaaccacacagccagguaaaaagacu

SEQ ID NO: 1934 - RNA, 111 nt, Ateles geoffroyi
ggccagcugugaguguuucuuuggcagugucuuagcugguuguugugugcaauagugaaggaagcaaucagcaaguauacugcccuagaagugcugcacguuguggggccc

SEQ ID NO: 1935 - RNA, 111 nt, Lagothrix lagotricha
ggccagcugugaguguuucuuuggcagugucuuagcugguuguugugagcaauagugaaggaagcaaucagcaaguauacugcccuagaagugcugcacguuguggggccc

SEQ ID NO: 1936 - RNA, 111 nt, Saguinus labiatus
ggccggcugugaguguuucuuuggcagugucuuagcugguuguugugagcaauagugaaggaagcaaucagcaaguauacugcccuagaagugcugcacguuguggggccc

SEQ ID NO: 1937 - RNA, 110 nt, Macaca mulatta
ggccagcugugaguguuucuuuggcagugucuuagcugguuguugugagcaauaguaaggaagcaaucagcaaguauacugcccuagaagugcuacacauuguggggccu

SEQ ID NO: 1938 - RNA, 77 nt, Macaca mulatta
agucuaguuaccaggcaguguaguuagcugauugcugauaguaccaaucacuaaccacacggccagguaaaaagauu

SEQ ID NO: 1939 - RNA, 110 nt, Macaca nemestrina; identical to SEQ ID NO: 1937

SEQ ID NO: 1940 - RNA, 110 nt, Gorilla gorilla; identical to SEQ ID NO: 1558

SEQ ID NO: 1941 - RNA, 110 nt, Pan paniscus
ggccagcugugaguguuucuuuggcagugucuuagcugguuguugugagcaauaguaaggaagcaaucagcaaguauacugcccuagaagugcugcacguuguggccccc

SEQ ID NO: 1942 - RNA, 110 nt, Pan troglodytes; identical to SEQ ID NO: 1558

SEQ ID NO: 1943 - RNA, 110 nt, Pongo pygmaeus; identical to SEQ ID NO: 1558

SEQ ID NO: 1944 - RNA, 66 nt, Canis familiaris
uggcagugucuuagcugguuguugugaguaauagugaaggaagcaaucagcaaguauacugcccua

SEQ ID NO: 1945 - RNA, 55 nt, Canis familiaris
aggcaguguaguuagcugauugcuaauaguaccaaucacuaaccacacggccagg

SEQ ID NO: 1946 - RNA, 111 nt, Monodelphis domestica
ggccagcugugaguguuucuuuggcagugucuuagcugguuguugugaguaauagauaaggaagcaaucagcaaguauacugcccuagaagugcugcacguuguuaggccc

SEQ ID NO: 1947 - RNA, 109 nt, Gallus gallus
gccagcugugaguguuucuuuggcagugucuuagcugguuguugugagcaauaguuaaggaagcaaucagcaaguauacugcccuagaagugcuacacauuguugggcc

SEQ ID NO: 1948 - RNA, 74 nt, Gallus gallus
agccugguuaccaggcaguguaguuagcugauugccaccaggaccaaucacuaaccacacagccagguaaaaag

SEQ ID NO: 1949 - RNA, 96 nt, Xenopus tropicalis
cugugaguguuucuuuggcagugucuuagcugguuguuguggcacguuauagaaguagcaaucagcaaauauacugcccuagaaguucugcacauu

SEQ ID NO: 1950 - RNA, 107 nt, Bos taurus
ggccagcugugaguguuucuuuggcagugucuuagcugguuguugugaguaauaaugcaggaagcaaucagcaaguauacugcccuagaagugcugcacguuguggg

SEQ ID NO: 1951 - RNA, 84 nt, Bos taurus
gugcucgguuuguaggcaguguaauuagcugauuguacucucaugcuuacaaucacuaguuccacugccaucaaaacaaggcac

SEQ ID NO: 1952 - RNA, 77 nt, Bos taurus
agucuaguuacuaggcaguguaguuagcugauugcuaauaauaccaaucacuaaccacacggccagguaaaaagauu

SEQ ID NO: 1953 - RNA, 98 nt, Danio rerio
cugcugugagugguucucuggcagugucuuagcugguuguuguguggagugagaacgaagcaaucagcaaguauacugccgcagaaacucgucaccuu

SEQ ID NO: 1954 - RNA, 84 nt, Danio rerio
ugcuguguggucaccaggcagugcaguuaguugauuacaauccauaaaguaaucacuaaccucacuaccaggugaaggcuagua

SEQ ID NO: 1955 - RNA, 91 nt, Mus musculus
cugugugugauggcuuggcaguguauuguuagcugguugaguaugugagcggcaccagcuaacaugcgacugcucuccuauugcacacaca

SEQ ID NO: 1956 - RNA, 109 nt, Mus musculus
aggaugaagugugggugugucaggcaggcagugcauugcuagcuggcuguuagaacuuuaucccaacaguugcuagcugcacuacccucugcugcacucagaagcaugc

SEQ ID NO: 1957 - RNA, 91 nt, Rattus norvegicus
cugugugcgauggguuggcaguguauuguuagcugguugaguauguaaaaggcaccagcuaacaugcaacugcucuccuauugcacauaca

SEQ ID NO: 1958 - RNA, 91 nt, Macaca mulatta
cugugugugaugagcuggcaguguauuguuagcugguugaauaugugaauggcaucagcuaacaugcaacugcugucuuauugcauauaca

SEQ ID NO: 1959 - RNA, 91 nt, Canis familiaris
ccgugugugauggguuggcaguguauuguuagcugguugaauauaugaauggcaucagcuaacaugcaacugcuaucuuauugcauauaca

SEQ ID NO: 1960 - RNA, 79 nt, Monodelphis domestica
ugugaugggauggcaguguauuguuagcugguugacuaucugaacgugccagcuaacaugcaacugcuaucccauugca

SEQ ID NO: 1961 - RNA, 86 nt, Gallus gallus
cugugugcggugggguggcaguguauguuagcugguugaaacucuugacaucagcuaacacgcaguugcuaaccugcuccacauac

SEQ ID NO: 1962 - RNA, 87 nt, Xenopus tropicalis
cuguguuuagaaggaaggcaguguaauguuagcugguuggaaaauagcagacacugguuaacuuacaccugccccccuucuuuacau

SEQ ID NO: 1963 - RNA, 80 nt, Mus musculus
agacucggguaggcaguguuguuagcuggcugcguugggucaggccagcagccacagcuacccugccacuuccuucuggc

SEQ ID NO: 1964 - RNA, 97 nt, Macaca mulatta
ugaccugaaucagguaggcaguguauuguuagcuggcugcuugagucaagucagcagccacaacuacccugccacuugcuucuggauaaauucuucu

SEQ ID NO: 1965 - RNA, 87 nt, Mus musculus
uucucugugcuuucagcuucuuuacaguguugccuuguggcauggaguucaagcagcauuguacagggcuaucaaagcacagagagc

SEQ ID NO: 1966 - RNA, 87 nt, Rattus norvegicus
uucucucugcuuuaagcuucuuuacaguguugccuuguggcauggaguucaagcagcauuguacagggcuaucaaagcacagagagc

SEQ ID NO: 1967 - RNA, 81 nt, Lagothrix lagotricha; identical to SEQ ID NO: 1561

SEQ ID NO: 1968 - RNA, 81 nt, Macaca mulatta; identical to SEQ ID NO: 1561

SEQ ID NO: 1969 - RNA, 81 nt, Macaca nemestrina; identical to SEQ ID NO: 1561

SEQ ID NO: 1970 - RNA, 81 nt, Gorilla gorilla; identical to SEQ ID NO: 1561

SEQ ID NO: 1971 - RNA, 81 nt, Pan paniscus; identical to SEQ ID NO: 1561

SEQ ID NO: 1972 - RNA, 81 nt, Pan troglodytes; identical to SEQ ID NO: 1561

SEQ ID NO: 1973 - RNA, 81 nt, Pongo pygmaeus; identical to SEQ ID NO: 1561

SEQ ID NO: 1974 - RNA, 58 nt, Canis familiaris
agcuucuuuacaguguugccuuguggcauggaguucaagcagcauuguacagggcuau

SEQ ID NO: 1975 - RNA, 84 nt, Monodelphis domestica
cuucuuucugcuuucggcuucucuacaguguugccuuguggcguggaguucaagcagcauuguacagggcuaucaaagcauaga

SEQ ID NO: 1976 - RNA, 81 nt, Gallus gallus
cucuuugcuuucagcuucuuuacaguguugccuuguggcauggaguucaagcagcauuguacagggcuaucaaagcaugga

SEQ ID NO: 1977 - RNA, 73 nt, Xenopus tropicalis
cugcuuucagcuucuuuacaguguugccuuguggcauggaguucaagcagcauuguacagggcuaucaaagca

SEQ ID NO: 1978 - RNA, 81 nt, Bos taurus; identical to SEQ ID NO: 1561

SEQ ID NO: 1979 - RNA, 87 nt, Sus scrofa
uucucucugcuuucagcuucuuuacaguguugccuuguggcauggaguucaagcagcauuguacagggcuaucaaagcacagagagc

SEQ ID NO: 1980 - RNA, 89 nt, Danio rerio
ucugugugcucugagcuucuuuacaguguugucuuguggcauggagaucaagcagcauuguacagggcuaucacagcacacugaacagc

SEQ ID NO: 1981 - RNA, 87 nt, Fugu rubripes
uucugucugcugugagcuucuuuacaguguugccuuguggcauggcgaucaagcagcauuguacagggcuaucaccgcacacagagc

SEQ ID NO: 1982 - RNA, 89 nt, Tetraodon nigroviridis
ucugucugcugugagcuucuuuacaguguugccuuguggcauggcgaucaagcagcauuguacagggcuaucaccgcacacagagcugc

SEQ ID NO: 1983 - RNA, 100 nt, Pan troglodytes; identical to SEQ ID NO: 1562

SEQ ID NO: 1984 - RNA, 95 nt, Gallus gallus
ugcgucucuccguguccugccagugguuuuacccuaugguagguuacgucaugcuguucuaccacaggguagaaccacggacgggaugccggggc

SEQ ID NO: 1985 - RNA, 94 nt, Xenopus tropicalis
cccucucuguguccucccagugguuuuacccuaugguagguuacgucaggcuguucuaccacaggguagaaccacggacaggauacggggagcu

SEQ ID NO: 1986 - RNA, 70 nt, Sus scrofa
ccugccagugguuuuacccuaugguagguuacgucaugcuguucuaccacaggguagaaccacggacagg

SEQ ID NO: 1987 - RNA, 97 nt, Mus musculus
caggcacccuuagcauuugaggugaaguucuguuauacacucaggcuguggcucugaaagucagugcaucacagaacuuugucucgaaagcuuucua

SEQ ID NO: 1988 - RNA, 68 nt, Macaca mulatta
gaggcaaaguucugagacacuccgacucugaguaugauagaagucagugcacuacagaacuuugucuc

SEQ ID NO: 1989 - RNA, 99 nt, Macaca mulatta; identical to SEQ ID NO: 1563

SEQ ID NO: 1990 - RNA, 60 nt, Canis familiaris
aaaguucugagacacuccgacucugaauaugauagaagucagugcacuacagaacuuugu

SEQ ID NO: 1991 - RNA, 61 nt, Canis familiaris
gaaguucuguuauacacucaggcuguggcucucugaaagucagugcaucacagaacuuugu

SEQ ID NO: 1992 - RNA, 68 nt, Gallus gallus
gaagcaaaguucugugacacucagacucugguuacgauagcagucagugcacuacagaacuuugucuc

SEQ ID NO: 1993 - RNA, 86 nt, Xenopus tropicalis
uagucuuuuaaaucaaaguucugugacacuuagacucugaauaugauagcagucagugcacuacagaacuuuguuuugggagucug

SEQ ID NO: 1994 - RNA, 97 nt, Xenopus tropicalis
ugaggaacagcguuugaggugaaguucuguuauacacuccggcugugaguaaguggaagucagugcaucacagaacuuugucucgagggcuucacua

SEQ ID NO: 1995 - RNA, 68 nt, Bos taurus
gaggcaaaguucugagacacuccgacucugaauaugauagaagucagugcacuacagaacuuugucuc

SEQ ID NO: 1996 - RNA, 90 nt, Bos taurus
uuagcauuugaggugaaguucuguuauacacucaggcuguggcucucugaaagucagugcaucacagaacuuugucucgaaagcuuucua

SEQ ID NO: 1997 - RNA, 68 nt, Sus scrofa; identical to SEQ ID NO: 1995

SEQ ID NO: 1998 - RNA, 79 nt, Danio rerio
cuuuccaaguaaaguucugugauacacuccgacucugaauguuugcagucagugcauuacagaacuuuguuuugggagu

SEQ ID NO: 1999 - RNA, 79 nt, Fugu rubripes
cuuuccaaauaaaguucugugauacacuuagacucuaguuccucgcagucagugcauuacagaacuuuguuuugggagu

SEQ ID NO: 2000 - RNA, 66 nt, Tetraodon nigroviridis
aaauaaaguucugugauacacuucgacucugauuccucgcagucagugcauuacagaacuuuguuu

SEQ ID NO: 2001 - RNA, 67 nt, Mus musculus
cugugugauauguuugauauauuagguuguuauuuaauccaacuauauaucaagcauauuccuacag

SEQ ID NO: 2002 - RNA, 85 nt, Rattus norvegicus
ugcaggccucugugugauauguuugauauauuagguuguuauuuaauccaacuauauaucaagcauauuccuacagugucuugcc

SEQ ID NO: 2003 - RNA, 78 nt, Rattus norvegicus
ugcuucugugugauauguuugauauuagguuguuaaauuaugaaccaacuaaaugucaaacauucucacagcagugag

SEQ ID NO: 2004 - RNA, 85 nt, Macaca mulatta; identical to SEQ ID NO: 1564

SEQ ID NO: 2005 - RNA, 79 nt, Macaca mulatta
ugcuucugugugauauguuugauauuggguuguuuaauuaggaaccaacuaaaugucaaacauauucuuacagcagcug

SEQ ID NO: 2006 - RNA, 85 nt, Gorilla gorilla; identical to SEQ ID NO: 1564

SEQ ID NO: 2007 - RNA, 85 nt, Pan paniscus; identical to SEQ ID NO: 1564

SEQ ID NO: 2008 - RNA, 85 nt, Pan troglodytes; identical to SEQ ID NO: 1564

SEQ ID NO: 2009 - RNA, 85 nt, Gallus gallus
ugcaggacucugugugauauguuugauauauuagguuguuauuuaauccaacuauauaucaaacauauuccuacaguguccugcc

SEQ ID NO: 2010 - RNA, 126 nt, Danio rerio
ucuggaggugagguagaccuggaagccuuucugcaggccucuguuugauauguuugauauauuagguuguuauucuguccaacuauauaucaaacauauuccuacaguguccugcucugucuccag

SEQ ID NO: 2011 - RNA, 90 nt, Danio rerio
uguuacagacuaugugauauguuugauauucgguugcuuucuuuauaucaugucaacuaaauaucagacauauuccuauagacugugaca

SEQ ID NO: 2012 - RNA, 67 nt, Fugu rubripes
cugucugauauguuugauauauuagguuguuauucaguccaacuauauaucaaacauauuccuacag

SEQ ID NO: 2013 - RNA, 67 nt, Tetraodon nigroviridis; identical to SEQ ID NO: 2012

SEQ ID NO: 2014 - RNA, 110 nt, Lagothrix lagotricha
aggaagcuucuggagauccugcuccgucgccccaguguucagacuaccuguucaggacaaugccguuguacaguagucugcacauugguuagacugggcaagggagaaca

SEQ ID NO: 2015 - RNA, 110 nt, Saguinus labiatus; identical to SEQ ID NO: 1566

SEQ ID NO: 2016 - RNA, 110 nt, Macaca mulatta; identical to SEQ ID NO: 1566

SEQ ID NO: 2017 - RNA, 71 nt, Macaca mulatta
gccaacccaguguucagacuaccuguucaggaggcucucaacguguacaguagucugcacauugguuaggc

SEQ ID NO: 2018 - RNA, 110 nt, Macaca nemestrina; identical to SEQ ID NO: 1566

SEQ ID NO: 2019 - RNA, 110 nt, Gorilla gorilla; identical to SEQ ID NO: 1566

SEQ ID NO: 2020 - RNA, 110 nt, Pan paniscus; identical to SEQ ID NO: 1566

SEQ ID NO: 2021 - RNA, 110 nt, Pan troglodytes; identical to SEQ ID NO: 1566

SEQ ID NO: 2022 - RNA, 110 nt, Pongo pygmaeus; identical to SEQ ID NO: 1566

SEQ ID NO: 2023 - RNA, 96 nt, Xenopus tropicalis
aagaaccugcuccgucgccccaguguucagacuaccuguucaggacaaugcuguuguacaguagucugcacauugguuagacugggcaugggacag

SEQ ID NO: 2024 - RNA, 87 nt, Danio rerio
uccugcuccgucaucccaguguucagacuaccuguucaggaucauacugguguacaguagucugcacauugguuagacugugcaugg

SEQ ID NO: 2025 - RNA, 96 nt, Danio rerio
ggaguuuuuguggacgcccgucccgccugcccaguguucagacuaccuguucaggaauuaguguuuguacaguagucugcacauugguuaggcugg

SEQ ID NO: 2026 - RNA, 98 nt, Danio rerio
ccucccccucgccugcccaguguucagacuaccuguucaucaugcugcagcugaacaguaguccgcacauugguuaggcugggcugggacacacacac

SEQ ID NO: 2027 - RNA, 87 nt, Fugu rubripes
uccugcuccgucaucccaguguucagacuaccuguucaggauuuuacugguguacaguagucugcacauugguuagacagugcaugg

SEQ ID NO: 2028 - RNA, 73 nt, Fugu rubripes
ccgccugcccaguguucagacuaccuguucaggaaguagugguuguacaguagucugcacauugguuaggcug

SEQ ID NO: 2029 - RNA, 99 nt, Fugu rubripes
cuccccguccugccugcccaguguucagacuaccuguucaucagacuaaagcugaacaguagucugcacauugguuaagcuggguugggacacacacgc

SEQ ID NO: 2030 - RNA, 86 nt, Tetraodon nigroviridis
ccggcuccguccacccaguguucagacuaccuguucauugucauacugguguacaguagucugcacauugguuagacugggcacgg

SEQ ID NO: 2031 - RNA, 73 nt, Tetraodon nigroviridis; identical to SEQ ID NO: 2028

SEQ ID NO: 2032 - RNA, 95 nt, Tetraodon nigroviridis
ccccacccugccugcccaguguucagacuaccuguucaucagacucaagcugaacaguagucugcacauugguuaugcagaguugggacacacac

SEQ ID NO: 2033 - RNA, 89 nt, Monodelphis domestica
cuccacuccgucuacccaguguuuagacuaucuguucaggacuccaauauuguacaguagucugcacauugguuaggcugggcugggcu

SEQ ID NO: 2034 - RNA, 110 nt, Xenopus tropicalis
aagaucccgagagguggguggucccguucccccaguguucagacuacguguucguuggacagaaccugaacaguagucuacacacugguuaaacugggccaugcggucaa

SEQ ID NO: 2035 - RNA, 100 nt, Bos taurus
ccuccacuccgucuacccaguguuuagacuaucuguucaggacucccaaauuguacaguagucugcacauugguuaggcugggcuggguuagacccucgg

SEQ ID NO: 2036 - RNA, 89 nt, Gallus gallus
gcucguuguuccuuuuuccuaugcauauacuucuuugagaguuugaucuaaagaggcauagagcaugggaaaauggggcgacugaggua

SEQ ID NO: 2037 - RNA, 87 nt, Xenopus tropicalis
cucgcuguuccuuuuuccuaugcauauaccucuuugaaaaaugaauguaaaggggcauagggcaugggaaaauggcgcagcugagcc

SEQ ID NO: 2038 - RNA, 87 nt, Xenopus tropicalis
cucgcuguuccuuuuuccuaugcauauaccucuuugaaaaauaaauguaaaggggcauagggcaugggaaaauggcgcagcugagcc

SEQ ID NO: 2039 - RNA, 77 nt, Mus musculus
ccucucagggaagcuuuuugcucgcguuauguuucucauccgaauauaagacgaacaaaagguuugucugagggcug

SEQ ID NO: 2040 - RNA, 83 nt, Rattus norvegicus
uuccuuugacgggugagcuuuuggcccggguuauaccugacucucacguauaagacgagcaaaaagcuuguuggucagaggag

SEQ ID NO: 2041 - RNA, 71 nt, Macaca mulatta
ugacaggcgagcuuuuggcccggguuauaccugaugcucacguauaagacgagcaaaaagcuuguugguca

SEQ ID NO: 2042 - RNA, 77 nt, Macaca mulatta
ccucucagggaagcuuuuugcucgaauuauguuucugauccgaauauaagacgaacaaaagguuugucugagggcag

SEQ ID NO: 2043 - RNA, 77 nt, Monodelphis domestica
uuccugugacaggugagcuuuugguccggguuauaccugaugcauguguauaagacgagcaaaaagcucguuggucg

SEQ ID NO: 2044 - RNA, 81 nt, Xenopus tropicalis
uccuuucaacaggcaagcuuuuugcuuggauuauguuuucuguuguuguauaagacgagcauaaagcuuguuuguuagaag

SEQ ID NO: 2045 - RNA, 110 nt, Mus musculus
ccggggcagucccuccaggcucaggacagccacugcccaccgcacacugcguugcuccggacccacugugcgugugacagcggcugaucugucccugggcagcgcgaacc

SEQ ID NO: 2046 - RNA, 110 nt, Rattus norvegicus
ccggggcagucccuccaggcucaggacagccacugcccacagcacacugcguugcuccggacccacugugcgugugacagcggcugaucugucccugggcagcgcgaacc

SEQ ID NO: 2047 - RNA, 110 nt, Macaca mulatta
acccggcagucccuccaggcgcagggcagccccugcccaccgcacacugcgcugccccagacccacugugcgugugacagcggcugaucugugccugggcagcgcgaccc

SEQ ID NO: 2048 - RNA, 91 nt, Xenopus tropicalis
uccagaugcaggucagccacugacuaacgcacauugcgcugcuccuaaaaugccacugugcgugugacagcggcuaaccagcaucuaggaa

SEQ ID NO: 2049 - RNA, 73 nt, Danio rerio
gcagguaagccacugacuaacgcacauugcgccuauucuccacuccacugugcgugugacagcggcuaaccag

SEQ ID NO: 2050 - RNA, 98 nt, Fugu rubripes
ucuaaaagcaggugagccacugacuaacgcacauugcgccaguugacaguuccacugugcgugugacagcggcuaaccugguuuugggaacgcuucug

SEQ ID NO: 2051 - RNA, 82 nt, Tetraodon nigroviridis
caggugagccacugacuaacgcacauugugccaguugacaguuccacugugcgugugacagcggcuaaccugguuuugggga

SEQ ID NO: 2052 - RNA, 106 nt, Mus musculus
cugcuuggaccugugaccugugggcuucccuuugucauccuuugccuaggccucugagugaggcaaggacagcaaaggggggcucaguggucaccucuacugcaga

SEQ ID NO: 2053 - RNA, 106 nt, Rattus norvegicus
cagcuuggaccugugaccucugggcuucccuuugucauccuuugccuaggccucugaguggggcaaggacagcaaaggggggcucaguggucaccucuacugcaga

SEQ ID NO: 2054 - RNA, 109 nt, Macaca mulatta
ucacuggccaugugacuugugggcuucccuuugucauccuuugccuagggcucugagcagggcagggacagcaaaggggugcucaguugucacuucccacagcacagag

SEQ ID NO: 2055 - RNA, 109 nt, Macaca nemestrina
ucacuggccaugugacuugugggcuucccuuugucauccuucgccuagggcucugagcagggcagggacagcaaaggggugcucaguugucacuucccacagcacagag

SEQ ID NO: 2056 - RNA, 110 nt, Pongo pygmaeus
ucacccagccaugugacuuguggacuucccuuugucauccuucgccuagggcucugagcagggcagggacagcaaaggggugcucaguugucacuucccacagcacggag

SEQ ID NO: 2057 - RNA, 74 nt, Gallus gallus
ccugugagcuucccuuugucauccuaugccugagcgaugccuggaggcugggacggugaagggaggcccacggg

SEQ ID NO: 2058 - RNA, 110 nt, Mus musculus; identical to SEQ ID NO: 1572

SEQ ID NO: 2059 - RNA, 110 nt, Rattus norvegicus
guccuggauggacagaguugucaugugucugccugucuacacuugcugugcagaacauccgcucaccuguacagcaggcacagacaggcagucacaugacaacccagccu

SEQ ID NO: 2060 - RNA, 110 nt, Ateles geoffroyi; identical to SEQ ID NO: 1572

SEQ ID NO: 2061 - RNA, 110 nt, Saguinus labiatus; identical to SEQ ID NO: 1572

SEQ ID NO: 2062 - RNA, 110 nt, Macaca mulatta; identical to SEQ ID NO: 1572

SEQ ID NO: 2063 - RNA, 110 nt, Macaca nemestrina; identical to SEQ ID NO: 1572

SEQ ID NO: 2064 - RNA, 110 nt, Gorilla gorilla; identical to SEQ ID NO: 1572

SEQ ID NO: 2065 - RNA, 110 nt, Pan paniscus; identical to SEQ ID NO: 1572

SEQ ID NO: 2066 - RNA, 110 nt, Pan troglodytes; identical to SEQ ID NO: 1572

SEQ ID NO: 2067 - RNA, 110 nt, Pongo pygmaeus; identical to SEQ ID NO: 1572

SEQ ID NO: 2068 - RNA, 110 nt, Monodelphis domestica
gggcuggcuggacggaguugucaugugucugccugucuacacuugcugugcagaacauccucucaccuguacagcaggcacagacaggcagucacaugacaacccagccu

SEQ ID NO: 2069 - RNA, 107 nt, Xenopus tropicalis
uuggcuggaaggaguugucaugugucugccugucuacacuugcugugcagaacauccucucaccuguacagcaggcacagacaggcagucacaugacaacccagccu

SEQ ID NO: 2070 - RNA, 110 nt, Bos taurus
ggccuggcuggacggaguugucaugugucugccugucuacacuugcugugcagaacauccgcucaccuguacagcaggcacagacaggcagucacaugacaacccagccu

SEQ ID NO: 2071 - RNA, 110 nt, Sus scrofa; identical to SEQ ID NO: 2070

SEQ ID NO: 2072 - RNA, 100 nt, Danio rerio
ugacugagagcguugucugucugccugucuacacuugcugugcagaacuuccugcaccuguacagcaggcacagacaggcagacagauggcagcccgccu

SEQ ID NO: 2073 - RNA, 99 nt, Fugu rubripes
caggaugagacuguuguggugugucugccugucuacacuugcugugcagaccuucugcuccuguacagcaggcacagacaggcagacagauggcagccc

SEQ ID NO: 2074 - RNA, 88 nt, Tetraodon nigroviridis
guggugugucugccugucuacacuugcugugcagaccuucugcuccuguacagcaggcacagacaggcagacagauggcagccccacu

SEQ ID NO: 2075 - RNA, 110 nt, Mus musculus
gugauaauggagcgagauuuucuguugugcuugaucuaaccaugugcuugcgagguaugagaaaaacaugguuccgucaagcaccauggaacgucacgcagcuuucuaca

SEQ ID NO: 2076 - RNA, 110 nt, Mus musculus
gaccaguugccgcggggcuuuccuuugugcuugaucuaaccaugugguggaacgauggaaacggaacaugguucugucaagcaccgcggaaagcaucgcucucuccugca

SEQ ID NO: 2077 - RNA, 110 nt, Rattus norvegicus
gugauaacguagcgagauuuucuguugugcuugaucuaaccaugugcuugcgagguaugaguaaaacaugguuccgucaagcaccauggaacgucacgcagcuuucuaca

SEQ ID NO: 2078 - RNA, 110 nt, Rattus norvegicus; identical to SEQ ID NO: 2076

SEQ ID NO: 2079 - RNA, 110 nt, Ateles geoffroyi; identical to SEQ ID NO: 1573

SEQ ID NO: 2080 - RNA, 110 nt, Lagothrix lagotricha; identical to SEQ ID NO: 1573

SEQ ID NO: 2081 - RNA, 110 nt, Lagothrix lagotricha; identical to SEQ ID NO: 1574

SEQ ID NO: 2082 - RNA, 110 nt, Saguinus labiatus; identical to SEQ ID NO: 1573

SEQ ID NO: 2083 - RNA, 110 nt, Saguinus labiatus
gaccagucgcugcggagcuuuccuuugugcuugaucuaaccaugugguggaacgauggaaacggaacaugguucugucaagcaccgcggaaagcaccgugcucuccugca

SEQ ID NO: 2084 - RNA, 105 nt, Macaca mulatta
aauguagcgagauuuucuguugugcuugaucuaaccaugugguugcgagguaugaguaaaacaugguuccgucaagcaccauggaacgucacgcagcuuucuaca

SEQ ID NO: 2085 - RNA, 110 nt, Macaca mulatta; identical to SEQ ID NO: 1574

SEQ ID NO: 2086 - RNA, 110 nt, Macaca nemestrina
gugacaauguagcgagauuuucuguugugcuugaucuaaccaugugguugcgagguaugaguaaaacaugguuccgucaagcaccauggaacgucacgcagcuuucuaca

SEQ ID NO: 2087 - RNA, 110 nt, Macaca nemestrina; identical to SEQ ID NO: 1574

SEQ ID NO: 2088 - RNA, 110 nt, Gorilla gorilla; identical to SEQ ID NO: 1573

SEQ ID NO: 2089 - RNA, 110 nt, Pan paniscus; identical to SEQ ID NO: 1573

SEQ ID NO: 2090 - RNA, 110 nt, Pan paniscus; identical to SEQ ID NO: 1574

SEQ ID NO: 2091 - RNA, 110 nt, Pan troglodytes; identical to SEQ ID NO: 1573

SEQ ID NO: 2092 - RNA, 110 nt, Pan troglodytes; identical to SEQ ID NO: 1574

SEQ ID NO: 2093 - RNA, 110 nt, Pongo pygmaeus; identical to SEQ ID NO: 1573

SEQ ID NO: 2094 - RNA, 110 nt, Pongo pygmaeus; identical to SEQ ID NO: 1574

SEQ ID NO: 2095 - RNA, 110 nt, Lemur catta
gugauaauguagcgagauuuucuguugugcuugaucuaaccaugugguugccagguaugaguaaaacaugguuccgucaagcaccauggaacgucacgcagcuuucuaca

SEQ ID NO: 2096 - RNA, 64 nt, Canis familiaris
uugugcuugaucuaaccaugugguugccagguaugaguaaaacaugguuccgucaagcaccaug

SEQ ID NO: 2097 - RNA, 64 nt, Canis familiaris
uugugcuugaucuaaccaugugguggaacgauggaaacggaacaugguucugucaagcaccgcg

SEQ ID NO: 2098 - RNA, 109 nt, Monodelphis domestica
ugauuauguggcgagauuuucuguugugcuugaucuaaccaugugguugugagguaugaguaaaacaugguucugucaagcaccauggaacgucacgcagcuuucuaca

SEQ ID NO: 2099 - RNA, 109 nt, Gallus gallus
ugauaauguagcgagauuuucuguugugcuugaucuaaccaugugguugugagguaugaguaaaacaugguucugucaagcaccauggaacgucacgcagcuuucuaca

SEQ ID NO: 2100 - RNA, 95 nt, Gallus gallus
gggguuuuccuuugugcuugaucuaaccaugugguagaacaauacaaauugaacaugguucugucaagcaccauggaaggcugcauacucccugc

SEQ ID NO: 2101 - RNA, 109 nt, Gallus gallus; identical to SEQ ID NO: 2099

SEQ ID NO: 2102 - RNA, 109 nt, Xenopus tropicalis
ugguaacaaggcgagauuuucuguugugcuugaucuaaccaugugguugugagguaugaguaaaacaugguucugucaagcaccauggaacgucacgcagcuuucuaca

SEQ ID NO: 2103 - RNA, 84 nt, Xenopus tropicalis
gggguuuuccuuugugcuugaucuaaccaugugguagaacaauacauauugaacaugguucugucaagcaccauggaaggccac

SEQ ID NO: 2104 - RNA, 62 nt, Bos taurus
uuugugcuugaucuaaccaugugguggaacgauggaaacggaacaugguucugucaagcacc

SEQ ID NO: 2105 - RNA, 76 nt, Danio rerio
caggacaccauugugcuugaucuaaccaugcaguucccuuucuguccaugguugugccaagcacuuuggagacuug

SEQ ID NO: 2106 - RNA, 83 nt, Fugu rubripes
cggcugucucuugugcuugaucuaaccauguggccccgccuauugugacaucacaugguuccgucaagcgccagggaccgcug

SEQ ID NO: 2107 - RNA, 84 nt, Fugu rubripes
gguuguuccuuugugcuugaucuaaccauguggcugccggguucuuauaguggaacaugguucugucaagcaccauggaacggc

SEQ ID NO: 2108 - RNA, 76 nt, Fugu rubripes
caggaccccauugugcuugaucuaaccaugcagugcaucguguguccaugguugugccaagcaccuuggaggcuug

SEQ ID NO: 2109 - RNA, 83 nt, Tetraodon nigroviridis
cggcugucucuugugcuugaucuaaccauguggccccgccuauugugaaaucacaugguuccgucaagcgccagggaccgcug

SEQ ID NO: 2110 - RNA, 84 nt, Tetraodon nigroviridis
gguuguuccuuugugcuugaucuaaccauguggcugccagguucuuaucguggaacaugguucugucaagcaccauggaacggc

SEQ ID NO: 2111 - RNA, 76 nt, Tetraodon nigroviridis
caggaccccauugugcuugaucuaaccaugcagugcguccuguguccaugguugugccaagcaccuuggaggcuug

SEQ ID NO: 2112 - RNA, 63 nt, Macaca mulatta
aagaaaugguuuaccgucccacauacauuuucaauauguaugugggacgguaaaccgcuucuu

SEQ ID NO: 2113 - RNA, 98 nt, Macaca mulatta
augcagugcuugguuccuaguagguguccaguaaguguuuguuacauaauuuguuuauugaggaccuccuaucaaucaagcacugugcuaggcucugg

SEQ ID NO: 2114 - RNA, 94 nt, Sus scrofa
agugcuugguuccuaguagguguucaguaaguguuugugacauaauucguuuauugagcaccuccuaucaaucaagcacugugcuagguucugg

SEQ ID NO: 2115 - RNA, 97 nt, Mus musculus
cugucucggagccuggggcaggggggcaggaggggcucagggagaaaguaucuacagccccuggcccucucugcccuuccguccccuguccccaagu

SEQ ID NO: 2116 - RNA, 84 nt, Rattus norvegicus
uggggcaggggggcaggaggggcucagggagaaagcaucuacagccccuggcccucucugcccuuccguccccuguccccaaau

SEQ ID NO: 2117 - RNA, 63 nt, Canis familiaris
aggggggcaggaagggcucagggagaaagugugugcagccccuggcccucucugcccuuccgu

SEQ ID NO: 2118 - RNA, 97 nt, Mus musculus
uguucgcuucugguaccggaagagagguuuucugggucucuguuucuuugaugagaaugaaacacacccagcuaaccuuuuuuucaguaucaaaucc

SEQ ID NO: 2119 - RNA, 97 nt, Rattus norvegicus; identical to SEQ ID NO: 2118

SEQ ID NO: 2120 - RNA, 84 nt, Macaca mulatta
gugguaccugaagggagguuuucuggguuucuguuucuuuaaugaggaugaaacacaccugguuaaccucuuuuccaguaucaa

SEQ ID NO: 2121 - RNA, 80 nt, Macaca mulatta
gguaccugaagggagguuuucugggucucuguuucuuuacugaggaugaaacacaccugguuaaccucuuuuccaguauc

SEQ ID NO: 2122 - RNA, 66 nt, Rattus norvegicus
uccccaacaauauccuggugcugagugggugcacagugacuccagcaucagugauuuuguugaaga

SEQ ID NO: 2123 - RNA, 59 nt, Canis familiaris
aacaauauccuggugcugagugaugacacaugcaacuccagcaucagugauuuuguuga

SEQ ID NO: 2124 - RNA, 89 nt, Monodelphis domestica
ggccuuccuccccaacaauauccugaugcugagugagcggcacauggagacuccagcaucagugauuuuguugaagaggguggcugcca

SEQ ID NO: 2125 - RNA, 78 nt, Xenopus tropicalis
guccccuggaacaauauccugaugcugaaugagugggacauacaugcuccagcaucagugauuuuguugcaggcggca

SEQ ID NO: 2126 - RNA, 60 nt, Xenopus tropicalis
caacaauauccugaugccgucugagugugcgggaaagcuccagcaucagugauuuuguug

SEQ ID NO: 2127 - RNA, 85 nt, Danio rerio
gguuucucccugcaacaaucuccugaugcugccugaguguuuuucuuccacuccagcaucagugauuuuguugccggaggucacc

SEQ ID NO: 2128 - RNA, 85 nt, Danio rerio; identical to SEQ ID NO: 2127

SEQ ID NO: 2129 - RNA, 124 nt, Danio rerio
guguguguguguguuucuggugccugcugagaacaauauccugaugcugaaugaguguguugaaggaaacuccagcaucagugauuuuguugccagaggagcacuuugggcauccuguguauau

SEQ ID NO: 2130 - RNA, 124 nt, Danio rerio; identical to SEQ ID NO: 2129

SEQ ID NO: 2131 - RNA, 80 nt, Fugu rubripes
ggauucucccugcaacaacauccuggugcugccugagucacuuucacaaacuccagcaucagugauuuuguugcgggggg

SEQ ID NO: 2132 - RNA, 80 nt, Tetraodon nigroviridis; identical to SEQ ID NO: 2131

SEQ ID NO: 2133 - RNA, 77 nt, Xenopus tropicalis
gccuuggaaugacacgaucacucccguugagccgaaacucacagcgccaucgggaauaucgugucgcuccaaagcuc

SEQ ID NO: 2134 - RNA, 67 nt, Mus musculus
cucgucaggcucaguccccucccgauaaaccucaaaauagggucuuaccuagggggcuggcggcgua

SEQ ID NO: 2135 - RNA, 77 nt, Rattus norvegicus
gcaugcagggaagggggggcggggccucgcggcccugcugccucgucaggcucaguccccucccgauaaaccucaaa

SEQ ID NO: 2136 - RNA, 63 nt, Macaca mulatta
gucaggcucaguccccucccgauaaaccccuaaauagggacuuucccggggggugacccuggc

SEQ ID NO: 2137 - RNA, 63 nt, Bos taurus
gucaggcucaguccccucccgauaaaccucuaaauagggaccuucccggggggcuaccucggc

SEQ ID NO: 2138 - RNA, 73 nt, Macaca mulatta; identical to SEQ ID NO: 1584

SEQ ID NO: 2139 - RNA, 128 nt, Mus musculus
cagccagcucugaucucgcccucccugagggguccuguacugagcugccccgagguccuucacugugcucagcucggggcagcucaguacaggaugcgucagggugggagacaacggggaacaagcca

SEQ ID NO: 2140 - RNA, 61 nt, Macaca mulatta
cccucuagagggaagcgcuuucuguggucugaaagaaaagaaagugcuuccuuuuagaggg

SEQ ID NO: 2141 - RNA, 87 nt, Macaca mulatta
ucucaggcugugacccucuagagggaagcgcuuucuguggucugaaagaaaagaaagugcuuccuuuuagaggguuaccguuugaga

SEQ ID NO: 2142 - RNA, 81 nt, Macaca mulatta
gcugugacccucuagagggaagcgcuuucuguggucugaaagaaaagaaagugcuuccuuuuagaggguuaccguuugaga

SEQ ID NO: 2143 - RNA, 87 nt, Macaca mulatta; identical to SEQ ID NO: 2141

SEQ ID NO: 2144 - RNA, 80 nt, Macaca mulatta
ucccaagcugugacccuccaaagggaagcacuuucuguuuguugucugagagaaaacaaagugcuuccuuuuagagugug

SEQ ID NO: 2145 - RNA, 87 nt, Macaca mulatta
ucucaggcugugacccucuagagggaagcgauuucugugaucugaaagaaaagaaaaugguucccuuuagaguguuacuguuugaga

SEQ ID NO: 2146 - RNA, 99 nt, Macaca mulatta
uuuagaggugucucccugaagugaugcauaaccgaucaggaucuacucaugucaacuuugguaaaguuauguugcuugucagggugaggagagguuuug

SEQ ID NO: 2147 - RNA, 95 nt, Macaca mulatta
cagugcuggggucucaggaggcagcgcucucgggacaucuccaccauggccugggaucugcuccucuucacccuccucacucagggcacagguga

SEQ ID NO: 2148 - RNA, 91 nt, Macaca mulatta
cagugcuggggugucaggaggcagcgcucucagucuccaccauggccugggcucugcuccuccucacucuccucacucauggcacggguga

SEQ ID NO: 2149 - RNA, 97 nt, Macaca mulatta
cugcuccuucucccauacccauugcauaucggaguuguaaauucucaaaacaccuccugugugcauggauuacaggagggugagccuugucaucgug

SEQ ID NO: 2150 - RNA, 59 nt, Canis familiaris
uacccauugcauaucggaguugugaauucucaaagcaccuccugugugcauggauuaca

SEQ ID NO: 2151 - RNA, 80 nt, Bos taurus
cugcuccuucucccguacccauugcauaucggagcugugaauucucaaagcaccuccuaugugcauggauuacaggaggg

SEQ ID NO: 2152 - RNA, 66 nt, Mus musculus
gguaagugugccucgggugagcaugcacuuaauguagguguaugucacucggcucggcccacuacc

SEQ ID NO: 2153 - RNA, 66 nt, Macaca mulatta; identical to SEQ ID NO: 1613

SEQ ID NO: 2154 - RNA, 73 nt, Macaca mulatta
cccagggucuggugcggagagggcccacaguggacuuggugacacuguaugcccucaccgcucagccccuggg

SEQ ID NO: 2155 - RNA, 114 nt, Macaca mulatta
uuuaggggcugaugaaaguggaguucaguagacaacccuuuucaagcccugcaagaaacugggguuucuggaggagagggaaggugcugaaggggcugcucucgugagccugaa

SEQ ID NO: 2156 - RNA, 67 nt, Mus musculus
aucggguguaacagcaacuccauguggacugugcucggauuccaguggagcugcuguuacuucugau

SEQ ID NO: 2157 - RNA, 86 nt, Mus musculus
guggcucccacccucuguaacagcaacuccauguggaagugcccacugguuccaguggggcugcuguuaucugggguggcggcuag

SEQ ID NO: 2158 - RNA, 83 nt, Rattus norvegicus
auggagucaucacguguaacagcaacuccauguggacugugcacagaucccaguggagcugcuguuacuuuugauggccucca

SEQ ID NO: 2159 - RNA, 85 nt, Rattus norvegicus
uggcucccacccccuguaacagcaacuccauguggaagugcccacugauuccaguggggcugcuguuaucugggguggaggcugg

SEQ ID NO: 2160 - RNA, 85 nt, Ateles geoffroyi; identical to SEQ ID NO: 1617

SEQ ID NO: 2161 - RNA, 85 nt, Macaca mulatta; identical to SEQ ID NO: 1617

SEQ ID NO: 2162 - RNA, 85 nt, Macaca mulatta
uggcucccgcccccuguaacagcaacuccauguggaaguguccacugauuccaguggggcugcuguuaucuggggcgagggccgg

SEQ ID NO: 2163 - RNA, 85 nt, Macaca nemestrina; identical to SEQ ID NO: 1617

SEQ ID NO: 2164 - RNA, 85 nt, Gorilla gorilla; identical to SEQ ID NO: 1617

SEQ ID NO: 2165 - RNA, 85 nt, Pan troglodytes; identical to SEQ ID NO: 1617

SEQ ID NO: 2166 - RNA, 85 nt, Pongo pygmaeus
augguguuaucaaguguaacagcaacuccauguggacuguguaccaauuuccaguggagauguuguuacuuuugaugguuaccaa

SEQ ID NO: 2167 - RNA, 58 nt, Canis familiaris
uguaacagcaacuccauguggauugugugccaauuuccaguggagaugcuguuacuuu

SEQ ID NO: 2168 - RNA, 75 nt, Gallus gallus
uggugcucucauauguaacagcaacuccauguggacuacacugacuuccaguggagaugcuguuacuuuugauag

SEQ ID NO: 2169 - RNA, 80 nt, Xenopus tropicalis
uaguguguaucagguguaacagcaacuccauguggacuuguccguauuccaguggagaugcuguuacuuuugaugggcac

SEQ ID NO: 2170 - RNA, 86 nt, Xenopus tropicalis
ugaugcucauaaccuguaacagcaacuccauguggaaguagauauaauauuccgguggagaugcuguuaucuguaauguguaucua

SEQ ID NO: 2171 - RNA, 77 nt, Danio rerio
gcucgcuggguguaacagccgcuccauguggaaaaugcauucaagugcccauggagaagcuguuaccugcagagagu

SEQ ID NO: 2172 - RNA, 72 nt, Fugu rubripes
cgcuggauguaacagcaacuccauguggaagcuguaugugaguuccaguggaagugcuguuaccugcagaga

SEQ ID NO: 2173 - RNA, 81 nt, Tetraodon nigroviridis
gcgcgcuggauguaacagcaacuccauguggaagcuguauguguguuccaguggaagugcuguuaccugcagagauccacc

SEQ ID NO: 2174 - RNA, 59 nt, Canis familiaris
aauccuugcuaccugggugagagugcuuucugaaugcaaugcaccugggcaaggauucu

SEQ ID NO: 2175 - RNA, 81 nt, Mus musculus
ggggcugugccggguagagagggcagugggagguaagagcucuucacccuucaccaccuucuccacccagcauggccggca

SEQ ID NO: 2176 - RNA, 75 nt, Ateles geoffroyi; identical to SEQ ID NO: 1620

SEQ ID NO: 2177 - RNA, 75 nt, Macaca mulatta; identical to SEQ ID NO: 1620

SEQ ID NO: 2178 - RNA, 75 nt, Macaca nemestrina
ggcugugccggguagagagggcagugggagguaagagcucuucacccuucaccaccuucuccacccggcauggcc

SEQ ID NO: 2179 - RNA, 75 nt, Pan paniscus; identical to SEQ ID NO: 1620

SEQ ID NO: 2180 - RNA, 75 nt, Pan troglodytes; identical to SEQ ID NO: 1620

SEQ ID NO: 2181 - RNA, 75 nt, Pongo pygmaeus; identical to SEQ ID NO: 1620

SEQ ID NO: 2182 - RNA, 61 nt, Canis familiaris
cggguagagagggcagugggagguaagagcucuucacccuucaccaccuucuccacccagc

SEQ ID NO: 2183 - RNA, 95 nt, Mus musculus
auccaggucuggggcaugaaccuggcauacaauguagauuucuguguuuguuaggcaacagcuacauugucugcuggguuucaggcuaccuggaa

SEQ ID NO: 2184 - RNA, 109 nt, Rattus norvegicus
ugaauauccaggucuggggcaugaaccuggcauacaauguagauuucuguguuuguuaggcaacagcuacauugucugcuggguuucaggcuaccuggaagcauuucuc

SEQ ID NO: 2185 - RNA, 110 nt, Macaca mulatta; identical to SEQ ID NO: 1621

SEQ ID NO: 2186 - RNA, 110 nt, Gorilla gorilla; identical to SEQ ID NO: 1621

SEQ ID NO: 2187 - RNA, 110 nt, Pan paniscus; identical to SEQ ID NO: 1621

SEQ ID NO: 2188 - RNA, 110 nt, Pongo pygmaeus; identical to SEQ ID NO: 1621

SEQ ID NO: 2189 - RNA, 62 nt, Canis familiaris
accuggcauacaauguagauuucuguguuuguugggcaacagcuacauugucugcuggguuu

SEQ ID NO: 2190 - RNA, 74 nt, Monodelphis domestica
gcaugaaccuggcauacaauguagaauucuguguuuauuaaguaacagcuacauugucugcuggguuucaggcu

SEQ ID NO: 2191 - RNA, 99 nt, Gallus gallus
gacuguccagguuuggggcaugaaccuggcauacaauguagauuucuguguuuguuaagcaacagcuacauugucugcuggguuuccagcugccuggaa

SEQ ID NO: 2192 - RNA, 93 nt, Xenopus tropicalis
acccagacuuuggcgugcaccuggcauacaauguagaaaacuguguuugcaaagcaacagcuacauugucugcuggguuucaugcugaaugga

SEQ ID NO: 2193 - RNA, 110 nt, Bos taurus
ccaacauccaggucuagggcaugaaccuggcauacaauguagauuucuguguuuguugagcaacagcuacauugucugcuggguuucaggcuaccuggaaacacguucuu

SEQ ID NO: 2194 - RNA, 93 nt, Danio rerio
gucgugaaccuggcauacaauguagauuucugugugguacuaucuacagcuacauugucugcuggguuucaggccagcagaauaauucugcuc

SEQ ID NO: 2195 - RNA, 77 nt, Fugu rubripes
ccugaaccuggcauacaauguagauuucugugugcuuggauucuacagcuacauugucugcuggguuuccggauagc

SEQ ID NO: 2196 - RNA, 69 nt, Tetraodon nigroviridis
ccugaaccuggcauacaauguagauuucugugugcuuggauucuacagcuacauugucugcuggguuuc

SEQ ID NO: 2197 - RNA, 94 nt, Mus musculus
uucacugugggaugagguaguagguuguauaguuuuagggucacacccaccacugggagauaacuauacaaucuacugucuuuccuaaggugau

SEQ ID NO: 2198 - RNA, 96 nt, Mus musculus
cugcauguucccagguugagguaguagguuguauaguuuagaguuacaucaagggagauaacuguacagccuccuagcuuuccuugggacuugcac

SEQ ID NO: 2199 - RNA, 85 nt, Mus musculus
gcagggugagguaguagguugugugguuucagggcagugauguugccccuccgaagauaacuauacaaccuacugccuucccuga

SEQ ID NO: 2200 - RNA, 94 nt, Mus musculus
ugugugcauccggguugagguaguagguuguaugguuuagaguuacacccugggaguuaacuguacaaccuucuagcuuuccuuggagcacacu

SEQ ID NO: 2201 - RNA, 95 nt, Mus musculus
acggccuuuggggugagguaguagguuguaugguuuugggcucugccccgcucugcgguaacuauacaaucuacugucuuuccugaaguggccgc

SEQ ID NO: 2202 - RNA, 103 nt, Mus musculus
aauggguuccuaggaagagguaguagguugcauaguuuuagggcagagauuuugcccacaaggaguuaacuauacgaccugcugccuuucuuagggccuuauu

SEQ ID NO: 2203 - RNA, 93 nt, Mus musculus
cgcgccccccgggcugagguaggagguuguauaguugaggaagacacccgaggagaucacuauacggccuccuagcuuuccccaggcugcgcc

SEQ ID NO: 2204 - RNA, 89 nt, Mus musculus
aucagagugagguaguagauuguauaguugugggguagugauuuuacccuguuuaggagauaacuauacaaucuauugccuucccugag

SEQ ID NO: 2205 - RNA, 83 nt, Mus musculus
ugugggaugagguaguagauuguauaguuuuagggucauaccccaucuuggagauaacuauacagucuacugucuuucccacg

SEQ ID NO: 2206 - RNA, 85 nt, Mus musculus
cuggcugagguaguaguuugugcuguuggucggguugugacauugcccgcuguggagauaacugcgcaagcuacugccuugcuag

SEQ ID NO: 2207 - RNA, 94 nt, Rattus norvegicus; identical to SEQ ID NO: 2197

SEQ ID NO: 2208 - RNA, 96 nt, Rattus norvegicus
cggcaugcucccaggcugagguaguagguuguauaguuuagaguuacaacaagggagauaacuguacagccuccuagcuuuccuugggacuugcac

SEQ ID NO: 2209 - RNA, 85 nt, Rattus norvegicus
gcggggugagguaguagguugugugguuucagggcagugaugucgccccuccgaagauaacuauacaaccuacugccuucccuga

SEQ ID NO: 2210 - RNA, 94 nt, Rattus norvegicus; identical to SEQ ID NO: 2200

SEQ ID NO: 2211 - RNA, 95 nt, Rattus norvegicus; identical to SEQ ID NO: 2201

SEQ ID NO: 2212 - RNA, 98 nt, Rattus norvegicus
ugggcuccuaggaagagguaguagguugcauaguuuuagggcagagauuuugcccacaaggaguuaacuauacgaccugcugccuuucuuagggccuu

SEQ ID NO: 2213 - RNA, 93 nt, Rattus norvegicus; identical to SEQ ID NO: 2203

SEQ ID NO: 2214 - RNA, 89 nt, Rattus norvegicus; identical to SEQ ID NO: 2204

SEQ ID NO: 2215 - RNA, 83 nt, Rattus norvegicus; identical to SEQ ID NO: 2205

SEQ ID NO: 2216 - RNA, 85 nt, Rattus norvegicus; identical to SEQ ID NO: 2206

SEQ ID NO: 2217 - RNA, 80 nt, Macaca mulatta
ugggaugagguaguagguuguauaguuuuagggucacacccaccacugggagauaacuauacaaucuacugucuuuccua

SEQ ID NO: 2218 - RNA, 72 nt, Macaca mulatta
aggcugagguaguagguuguauaguuuagaauuacaucaagggagauaacuguacagccuccuagcuuuccu

SEQ ID NO: 2219 - RNA, 74 nt, Macaca mulatta
gggugagguaguagguuguauaguuuggggcucugcccugcuaugggauaacuauacaaucuacugucuuuccu

SEQ ID NO: 2220 - RNA, 83 nt, Macaca mulatta
cggggugagguaguagguugugugguuucagggcagugauguugccccucagaagauaacuauacaaccuacugccuucccug

SEQ ID NO: 2221 - RNA, 84 nt, Macaca mulatta
gcauccggguugagguaguagguuguaugguuuagaguuacacccugggaguuaacuguacaaccuucuagcuuuccuuggagc

SEQ ID NO: 2222 - RNA, 87 nt, Macaca mulatta
ccuaggaagagguaguagguugcauaguuuuagggcagggauuuugcccacaaggagguaacuauacgaccugcugccuuucuuagg

SEQ ID NO: 2223 - RNA, 79 nt, Macaca mulatta; identical to SEQ ID NO: 1622

SEQ ID NO: 2224 - RNA, 87 nt, Macaca mulatta
ucagagugagguaguagauuguauaguugugggguagugauuuuacccuguucaggagauaacuauacaaucuauugccuucccuga

SEQ ID NO: 2225 - RNA, 83 nt, Macaca mulatta; identical to SEQ ID NO: 2205

SEQ ID NO: 2226 - RNA, 84 nt, Macaca mulatta
aggcugagguaguaguuuguacaguuugagggucuaugauaccacccgguacaggagauaacuguacaggccacugccuugcca

SEQ ID NO: 2227 - RNA, 85 nt, Macaca mulatta; identical to SEQ ID NO: 2206

SEQ ID NO: 2228 - RNA, 69 nt, Canis familiaris
ugagguaguagguuguauaguuuggggcucugcccugcucuggguaacuauacaaucuacugucuuucc

SEQ ID NO: 2229 - RNA, 67 nt, Canis familiaris
ugagguaguagguuguaugguuuagaguuacacccugggaguuaacuguacaaccuucuagcuuucc

SEQ ID NO: 2230 - RNA, 67 nt, Canis familiaris
ugagguaggagguuguauaguugaggaggacacccacggagaucacuauacggccuccuagcuuucc

SEQ ID NO: 2231 - RNA, 78 nt, Canis familiaris
ugagguaguagauuguauaguugugggguagugauuuuacccuguucaggagauaacuauacaaucuauugccuuccc

SEQ ID NO: 2232 - RNA, 79 nt, Canis familiaris
ugagguaguaguuuguacaguuugagggucuaugauaccacccgguacaggagauaacuguacaggccacugccuugcc

SEQ ID NO: 2233 - RNA, 68 nt, Canis familiaris
ugagguaguagagugcaguaguuauaaaaggaaucucuggagcuagauugcuguacuucauaccugcu

SEQ ID NO: 2234 - RNA, 92 nt, Monodelphis domestica
ucuccacugugggaugagguaguagguuguauaguuuuagggucacacccaccacugggagauaacuauacaaucuacugucuuucuuaaag

SEQ ID NO: 2235 - RNA, 73 nt, Monodelphis domestica
agguugagguaguagguuguauaguuuagaauuacaucaagggagauaacuguacagccuccuagcuuuccuu

SEQ ID NO: 2236 - RNA, 79 nt, Monodelphis domestica
ggggugagguaguagguuguauaguuugggggucgcucccucugucugugagauaacuauacagucuacugucuuuccc

SEQ ID NO: 2237 - RNA, 88 nt, Monodelphis domestica
ggcggggugagguaguagguugugugguuucaggguagugauuuugccccaaucagaagauaacuauacaaccuacugccuucccuga

SEQ ID NO: 2238 - RNA, 106 nt, Monodelphis domestica
aaugggcuccuaggaagagguaguagguugcauaguuuuagggcagggauuuugcccacaaggaguuaacuauacaaccugcugccuuucuuagggcucuauuauu

SEQ ID NO: 2239 - RNA, 87 nt, Monodelphis domestica; identical to SEQ ID NO: 2224

SEQ ID NO: 2240 - RNA, 80 nt, Monodelphis domestica
gggaugagguaguagauuguauaguuuuagggucacacccgaucucggagauaacuauacagucuacugucuuucccacg

SEQ ID NO: 2241 - RNA, 83 nt, Monodelphis domestica
aggcugagguaguaguuuguacaguuugagggucuaugauaccacccgguacaggagauaacuguacaggccacugccuugcc

SEQ ID NO: 2242 - RNA, 84 nt, Monodelphis domestica
cuggcugagguaguaguuugugcuguuggucggguugugacauugcccgcuguggagauaacugcgcaagcuacugccuugcua

SEQ ID NO: 2243 - RNA, 90 nt, Gallus gallus
ugcacugugggaugagguaguagguuguauaguuuuagggucauacccgcaacugggagauaacuauacaaucuacugucuuuccuaaag

SEQ ID NO: 2244 - RNA, 72 nt, Gallus gallus
agguugagguaguagguuguauaguuuagaauuacaccaagggagauaacuguacaaccuccuagcuuuccu

SEQ ID NO: 2245 - RNA, 76 nt, Gallus gallus
gggugagguaguagguuguauaguuuuaggguuaugcccugccugucagauaacuauacaaucuacugucuuuccu

SEQ ID NO: 2246 - RNA, 85 nt, Gallus gallus
caggaugagguaguagguugugugguuucaggguagugauuuugccccaaucaggagauaacuauacaaccuacugccuucccug

SEQ ID NO: 2247 - RNA, 84 nt, Gallus gallus; identical to SEQ ID NO: 2221

SEQ ID NO: 2248 - RNA, 103 nt, Gallus gallus
auugggcuccuaggaagagguaguggguugcauaguuuuagggcagggauuuugcucacaaggagguaacuauacaaccugcugccuuucuuagggcuuuauu

SEQ ID NO: 2249 - RNA, 87 nt, Gallus gallus
ucagagugagguaguagauuguauaguuguaggguaguuauuuuacccuguucaggagauaacuauacaaucuauugccuucccuga

SEQ ID NO: 2250 - RNA, 83 nt, Gallus gallus; identical to SEQ ID NO: 2241

SEQ ID NO: 2251 - RNA, 84 nt, Gallus gallus; identical to SEQ ID NO: 2242

SEQ ID NO: 2252 - RNA, 83 nt, Gallus gallus
gugagguaguagguuguauaguuuggugggagggauucugucccauuucaggugauaacuauacagucuauugccuuccuuaa

SEQ ID NO: 2253 - RNA, 83 nt, Gallus gallus
ggcugagguaguagauugaauaguuguggaguccuauccucccuuugagcuaacuauacaaucuacugucuuuccuaaggaga

SEQ ID NO: 2254 - RNA, 89 nt, Xenopus tropicalis
gugggcuccaggcugagguaguagguuguauaguugaggauaacaccaaaggagauaacuguacagccuccuaucuuucccuggggcuu

SEQ ID NO: 2255 - RNA, 82 nt, Xenopus tropicalis
cuggcugagguaguaguuuguguaguuagggggcagugguguuugcccauggagauaacuagacaaacuacugccuugccag

SEQ ID NO: 2256 - RNA, 94 nt, Xenopus tropicalis
ugugugcauccagguugagguaguagguuguaugguuuagaaugacacccugggaguuaacuguacaaccuucuagcuuuccuuggagcucacu

SEQ ID NO: 2257 - RNA, 90 nt, Xenopus tropicalis
cccugugggaugagguaguagguuguuuaguuauugggccgcacccaccaaugggagagaacuacacaaccuacugucucuccuaaagug

SEQ ID NO: 2258 - RNA, 93 nt, Xenopus tropicalis
gcccuuuggggugagguaguagguuguuuaguuguggguugcacccugacguuuggauaacuauacaaucuacugucuuuccugaaguggcug

SEQ ID NO: 2259 - RNA, 83 nt, Xenopus tropicalis
ugcaggaugagguaguagauuguauaguuuuggggucacacccgaucugggagauaacuauacaguuuacugucuuuccugcg

SEQ ID NO: 2260 - RNA, 84 nt, Xenopus tropicalis
ggcugagguaguuguuuguacaguuuaagggucugugacaccacccucuguuggagauaacuguacaggccacugccuugccua

SEQ ID NO: 2261 - RNA, 85 nt, Xenopus tropicalis
cuggcugagguaguaguuugugcuguuggucggguugugacacugcccgcuguggagauaacugcgcaagcuacugccuugcuag

SEQ ID NO: 2262 - RNA, 80 nt, Bos taurus; identical to SEQ ID NO: 2217

SEQ ID NO: 2263 - RNA, 72 nt, Bos taurus
agguugagguaguagguuguauaguuuagaauuacaucaagggagauaacuguacagccuccuagcuuuccu

SEQ ID NO: 2264 - RNA, 74 nt, Bos taurus; identical to SEQ ID NO: 2219

SEQ ID NO: 2265 - RNA, 83 nt, Bos taurus
cggggugagguaguagguugugugguuucaggguagugauguugccccucggaagauaacuauacaaccuacugccuucccug

SEQ ID NO: 2266 - RNA, 84 nt, Bos taurus; identical to SEQ ID NO: 2221

SEQ ID NO: 2267 - RNA, 87 nt, Bos taurus
ccuaggaagagguaguagguugcauaguuuucgggcagggauuuugcccacaaggagguaacuauacgaccugcugccuuucuuagg

SEQ ID NO: 2268 - RNA, 79 nt, Bos taurus; identical to SEQ ID NO: 1622

SEQ ID NO: 2269 - RNA, 87 nt, Bos taurus; identical to SEQ ID NO: 2224

SEQ ID NO: 2270 - RNA, 83 nt, Bos taurus; identical to SEQ ID NO: 2205

SEQ ID NO: 2271 - RNA, 83 nt, Bos taurus; identical to SEQ ID NO: 2241

SEQ ID NO: 2272 - RNA, 84 nt, Bos taurus; identical to SEQ ID NO: 2242

SEQ ID NO: 2273 - RNA, 94 nt, Sus scrofa
ugugugcauccggguugagguaguagguuguaugguuuagaguuacaccgugggaguuaacuguacaaccuucuagcuuuccuuggagcacacu

SEQ ID NO: 2274 - RNA, 83 nt, Sus scrofa; identical to SEQ ID NO: 2205

SEQ ID NO: 2275 - RNA, 85 nt, Sus scrofa; identical to SEQ ID NO: 2206

SEQ ID NO: 2276 - RNA, 89 nt, Danio rerio
gacggugggaugagguaguagguuguauaguuuuagggucacacccacacugggagauaacuauacaaccuacugucuuucucaaaguc

SEQ ID NO: 2277 - RNA, 84 nt, Danio rerio
gcccccaggcugagguaguagguuguauaguuuagaauaacaucacuggagauaacuguacaaccuccuagcuuucccugagau

SEQ ID NO: 2278 - RNA, 107 nt, Danio rerio
gagacugucguuuggggugagguaguagguuguauaguuugaggguuuaacccuugcugucagauaacuauacaacuuacugucuuucccgaaguggccguaguguc

SEQ ID NO: 2279 - RNA, 93 nt, Danio rerio
gcgaugucucgggaugagguaguagguuguauaguuuagaguuacaacacgggagauaacuguacagccuccuagcuuuccucgagcagacgc

SEQ ID NO: 2280 - RNA, 124 nt, Danio rerio
guacguguuuuuggugucuggacaaggugagguaguagguuguauaguuuggugggagggaucaaacccuguucaggugauaacuauacagucuauugccuuccuugugucaccuaaggucugc

SEQ ID NO: 2281 - RNA, 129 nt, Danio rerio
cacagugaaccuguguguuucuucaaggugagguaguagguuguauaguuugugggaaggaucacauccuauucaggugauaacuauacagucuauugccuucccugagagacacaaugaccacgagug

SEQ ID NO: 2282 - RNA, 94 nt, Danio rerio
ucggacagggugagguaguagguugugugguuucaggguuguguuuuugccccaucaggaguuaacuauacaaccuacugccuucccugaaggg

SEQ ID NO: 2283 - RNA, 107 nt, Danio rerio
cugagagugugugcauccaggcugagguaguagguuguaugguuuagaauuuugcccugggaguuaacuguacaaccuucuagcuuuccuuggagcucacaagccag

SEQ ID NO: 2284 - RNA, 92 nt, Danio rerio
gugugcauccaggcugagguaguagguuguaugguuucgaaugacaccaugggaguuaacuguacaaccuucuagcuuuccuuggaguacac

SEQ ID NO: 2285 - RNA, 97 nt, Danio rerio
ugugcguugcggugugagguaguugguuguaugguuuugcauaauaaacagcccggaguuaacuguacaaccuucuagcuuucccugcggcugcacg

SEQ ID NO: 2286 - RNA, 88 nt, Danio rerio
cgcugcaggcugagguaguugguuguaugguuuugcaucauaaucagccuggaguuaacuguacaaccuucuagcuuucccugcggug

SEQ ID NO: 2287 - RNA, 100 nt, Danio rerio
gcuguucuuggggcugagguaguagauugaauaguuguggagcccugcgcucucucucugagauaacuauacaaucuacugucuuuccuaaggcgacagc

SEQ ID NO: 2288 - RNA, 116 nt, Danio rerio
ugguaaugcuugugcagugugagguaguagauuguauaguuguaggguagugauuuuauccuguguagaagauaacuauacaaucuauugccuucccugaggggcagaaauacaca

SEQ ID NO: 2289 - RNA, 96 nt, Danio rerio
gggggcuguggaaugagguaguaguuuguauaguuugggaucacaccagaucugggagauaacuauacagccuacugucuuucucacagcugcucc

SEQ ID NO: 2290 - RNA, 97 nt, Danio rerio
guggacugugggaugagguaguaguuuguauaguuuuaggaucacaccagaucugggagauaacuauacagucuacugucuuucccacgguuaccgc

SEQ ID NO: 2291 - RNA, 114 nt, Danio rerio
gaguuggcuguguuguggugagguaguaaguuguguuguuguuggggaucaguauaguauggcccuugaaggagauaacuauacaauuuacugccuuccauaaugcagacucuc

SEQ ID NO: 2292 - RNA, 95 nt, Danio rerio
guguacuggcugagguaguaguuugugcuguugguugggaugugacauugcccguuauggagaugacugcgcaagcuacucccuugccagugcug

SEQ ID NO: 2293 - RNA, 83 nt, Danio rerio
gguugagguaguuguuuguacaguuuuuagggucuguuauucugcccuguuaaggagcuaacuguacagacuacugccuugcc

SEQ ID NO: 2294 - RNA, 74 nt, Fugu rubripes
cagguugagguaguagguuguauaguugagagugacaccacaggagaugacuguacagccuccuagcuuucccu

SEQ ID NO: 2295 - RNA, 76 nt, Fugu rubripes
gggugagguaguagguuguauaguuuuaggguuauacccuuccugucagauaacuauacaacuuacugucuuuccu

SEQ ID NO: 2296 - RNA, 96 nt, Fugu rubripes
caaggugagguaguagguuguauaguuugugggauggcuuggauccuacucagaugauaacuauacagucuauuaccuuccuugagagguacaaug

SEQ ID NO: 2297 - RNA, 84 nt, Fugu rubripes
cagggugagguaguagguugugugguuucaggguugugauuuugccccaucaggagcuaacuauacaaccuacugccuucccug

SEQ ID NO: 2298 - RNA, 96 nt, Fugu rubripes
ugugcucugcagugugagguaguugguuguaugguuucgcauaauaaacagcacggagauaacuguacaaccuucuagcuuucccugcggagucac

SEQ ID NO: 2299 - RNA, 100 nt, Fugu rubripes
gcuguccuugggguugagguaguagauugaauaguugugggguugugugaccucuuagugagauaacuauacaaucuacugucuuuccuaaggagacagc

SEQ ID NO: 2300 - RNA, 79 nt, Fugu rubripes
ugggaugagguaguaguuuguauaguuuuaggaucacaccagaucugggagauaacuauacagucuacugucuuuccca

SEQ ID NO: 2301 - RNA, 84 nt, Fugu rubripes
uguggugagguaguaaguuguguuguuguaggggaagauugugcacccuguucaggagauaacuauacaacuuacugccuuccu

SEQ ID NO: 2302 - RNA, 84 nt, Fugu rubripes
cuggcugagguaguaguuugugcuguugguuggguugugacacugcccgcuauggagaugacugcgcaagcuacugccuugcua

SEQ ID NO: 2303 - RNA, 82 nt, Fugu rubripes
gucugagguaguuuuuuguacaguuugagggucugugauucugccccauacaggagcuaacuguacaagugacugccuugcc

SEQ ID NO: 2304 - RNA, 74 nt, Tetraodon nigroviridis
cagggugagguaguagguuguauaguugagagugacaccacaggagauaacuguacagccuccuagcuuucccu

SEQ ID NO: 2305 - RNA, 84 nt, Tetraodon nigroviridis
guccuuuggggugagguaguagguuguauaguuuuaggguuauacccuuccugucagauaacuauacaacuuacugucuuuccu

SEQ ID NO: 2306 - RNA, 96 nt, Tetraodon nigroviridis
caaggugagguaguagguuguauaguuugugggauggcuuggauccuacucagauuauaacuauacagucuauuaccuuccuugagagguacaaug

SEQ ID NO: 2307 - RNA, 84 nt, Tetraodon nigroviridis; identical to SEQ ID NO: 2297

SEQ ID NO: 2308 - RNA, 96 nt, Tetraodon nigroviridis; identical to SEQ ID NO: 2298

SEQ ID NO: 2309 - RNA, 100 nt, Tetraodon nigroviridis
gcuguccuuggggcugagguaguagauugaauaguugugggguugugugaccucuaugugagauaacuauacaaucuacugucuuucccaaggagacagc

SEQ ID NO: 2310 - RNA, 79 nt, Tetraodon nigroviridis; identical to SEQ ID NO: 2300

SEQ ID NO: 2311 - RNA, 99 nt, Tetraodon nigroviridis
aauuggcuuugcuguggugagguaguaaguuguguuguuguuggggaucaagauugugcacccugucaaggagauaacuauacaacuuacugccuuccu

SEQ ID NO: 2312 - RNA, 84 nt, Tetraodon nigroviridis; identical to SEQ ID NO: 2302

SEQ ID NO: 2313 - RNA, 82 nt, Tetraodon nigroviridis; identical to SEQ ID NO: 2303

SEQ ID NO: 2314 - RNA, 77 nt, Mus musculus
gcuugggacacauacuucuuuauaugcccauaugaaccugcuaagcuauggaauguaaagaaguauguauuucaggc

SEQ ID NO: 2315 - RNA, 72 nt, Mus musculus
ucagagcacauacuucuuuauguacccauaugaacauucagugcuauggaauguaaagaaguauguauuuug

SEQ ID NO: 2316 - RNA, 122 nt, Mus musculus
uuccuuuagcuucuucuuggcggacauuaccuacccaaaauacauacuucuuuacauuccauagcacugaauguucauauggguacauaaagaaguaugugcucugaguaggcacuccugcg

SEQ ID NO: 2317 - RNA, 87 nt, Rattus norvegicus
ugccuacucagagcacauacuucuuuauguacccauaugaacauagaaugcuauggaauguaaagaaguguguauuuuggguaggua

SEQ ID NO: 2318 - RNA, 77 nt, Macaca mulatta
gcuugggaaacauacuucuuuauaugcccauauggaccugcuaagcuauggaauguaaagaaguauguaucucaggc

SEQ ID NO: 2319 - RNA, 85 nt, Macaca mulatta; identical to SEQ ID NO: 1624

SEQ ID NO: 2320 - RNA, 85 nt, Pan paniscus; identical to SEQ ID NO: 1624

SEQ ID NO: 2321 - RNA, 59 nt, Canis familiaris
cauacuucuuuauaugcccauauggaccugcuaagcuauggaauguaaagaaguaugua

SEQ ID NO: 2322 - RNA, 59 nt, Canis familiaris
cauacuucuuuauguacccauaugaacauacaaugcuauggaauguaaagaaguaugua

SEQ ID NO: 2323 - RNA, 86 nt, Monodelphis domestica
accuacucagaguacauacuucuuuauguacccauaugaacauacaaugcuauggaauguaaagaaguauguauuuuugguaggug

SEQ ID NO: 2324 - RNA, 71 nt, Gallus gallus
ugagagacauacuucuuuauaugcccauaugaaccuggcaaucuauggaauguaaagaaguauguauuuca

SEQ ID NO: 2325 - RNA, 85 nt, Gallus gallus
accugcucagagcacauacuucuuuauguacccauaugaacauacaaugcuauggaauguaaagaaguauguauuuuuggcaggc

SEQ ID NO: 2326 - RNA, 64 nt, Gallus gallus
acauacuucuucauaugcccauauggagucggccggcguuauggaauguuaagaaguauguauc

SEQ ID NO: 2327 - RNA, 62 nt, Xenopus tropicalis
gcacauacuucuuuauaugcccauacugaaugaaaaugcuauggaauguuaagaaguaugua

SEQ ID NO: 2328 - RNA, 106 nt, Danio rerio
gcccauauaucccgcuugguagacauacuucuuuauaugcccauaugaacaagagcagcuauggaauguaaagaaguauguaucccaggugagagaaaaacggggc

SEQ ID NO: 2329 - RNA, 87 nt, Danio rerio
gccuacuugguguacauacuucuuuaugugcccauaugaacauauaaaagcuauggaauguaaagaaguauguauucuuggucaggu

SEQ ID NO: 2330 - RNA, 76 nt, Fugu rubripes
cuuaguguacauacuucuuuauguacccauauggacauaugauaacuauggaauguaaagaaguauguauucuugg

SEQ ID NO: 2331 - RNA, 92 nt, Tetraodon nigroviridis
auuaccuccuuaguguacauacuucuuuauguacccauaugaacauaugauaacuauggaauguaaagaaguauguauucuuggugagguga

SEQ ID NO: 2332 - RNA, 73 nt, Mus musculus
ccaggccacaugcuucuuuauauccucauagauaucucagcacuauggaauguaaggaagugugugguuuugg

SEQ ID NO: 2333 - RNA, 84 nt, Rattus norvegicus
cuuccccaggccacaugcuucuuuauauccucauagauaucacugcgcuauggaauguaaggaagugugugguuuuggcaagug

SEQ ID NO: 2334 - RNA, 86 nt, Macaca mulatta; identical to SEQ ID NO: 1625

SEQ ID NO: 2335 - RNA, 86 nt, Macaca nemestrina; identical to SEQ ID NO: 1625

SEQ ID NO: 2336 - RNA, 86 nt, Pongo pygmaeus; identical to SEQ ID NO: 1625

SEQ ID NO: 2337 - RNA, 60 nt, Canis familiaris
acaugcuucuuuauauccccauacggauuacguugcuauggaauguaaggaagugugugg

SEQ ID NO: 2338 - RNA, 76 nt, Monodelphis domestica
gaggcaacaugcuucuuuauauccccauaugaauuaugcugcuauggaauguaaggaagugugugguuucgggaag

SEQ ID NO: 2339 - RNA, 76 nt, Gallus gallus
gagaugacaugcuucuuuauauccccauauggauuaggcugcuauggaauguaaggaagugugugguuucagggag

SEQ ID NO: 2340 - RNA, 70 nt, Xenopus tropicalis
gaggucacaugcuucuuuauauacccauaugaacuacauuguuauggaauguaaggaaguguguggcuuc

SEQ ID NO: 2341 - RNA, 99 nt, Danio rerio
gaauguugccucuugugaagacaugcuuccuuauaugcccauauuaaugcucaaguuauggaauguaaggaagugugugguuucagggggaaauuuguc

SEQ ID NO: 2342 - RNA, 109 nt, Danio rerio
gaguuggcuguugcuuauugagacgacauacuuccuuauauccccauauucagaauuaaucuauggaauguaaggaaguguguggcuucagugagaucucaucaucauc

SEQ ID NO: 2343 - RNA, 89 nt, Mus musculus; identical to SEQ ID NO: 1627

SEQ ID NO: 2344 - RNA, 72 nt, Mus musculus
guuguuaucuuugguuaucuagcuguaugaguguauuggucuucauaaagcuagauaaccgaaaguaaaaac

SEQ ID NO: 2345 - RNA, 90 nt, Mus musculus
ggaggcccguuucucucuuugguuaucuagcuguaugagugccacagagccgucauaaagcuagauaaccgaaaguagaaaugacucuca

SEQ ID NO: 2346 - RNA, 89 nt, Rattus norvegicus; identical to SEQ ID NO: 1627

SEQ ID NO: 2347 - RNA, 87 nt, Rattus norvegicus; identical to SEQ ID NO: 1628

SEQ ID NO: 2348 - RNA, 90 nt, Rattus norvegicus
ggaggcccguuucucucuuugguuaucuagcuguaugagugccacagagccgucauaaagcuagauaaccgaaaguagaaaugacucuaa

SEQ ID NO: 2349 - RNA, 87 nt, Ateles geoffroyi; identical to SEQ ID NO: 1628

SEQ ID NO: 2350 - RNA, 87 nt, Lagothrix lagotricha; identical to SEQ ID NO: 1628

SEQ ID NO: 2351 - RNA, 89 nt, Macaca mulatta; identical to SEQ ID NO: 1627

SEQ ID NO: 2352 - RNA, 87 nt, Macaca mulatta; identical to SEQ ID NO: 1628

SEQ ID NO: 2353 - RNA, 90 nt, Macaca mulatta
ggaggcccguuucucucuuugguuaucuagcuguaugagugccacagagccgcucucaagcuagauaaccgaaaguagaaaugacucuca

SEQ ID NO: 2354 - RNA, 87 nt, Macaca nemestrina; identical to SEQ ID NO: 1628

SEQ ID NO: 2355 - RNA, 87 nt, Gorilla gorilla; identical to SEQ ID NO: 1628

SEQ ID NO: 2356 - RNA, 87 nt, Pan troglodytes; identical to SEQ ID NO: 1628

SEQ ID NO: 2357 - RNA, 62 nt, Canis familiaris
ucuuugguuaucuagcuguaugagugguguggagucuucauaaagcuagauaaccgaaagua

SEQ ID NO: 2358 - RNA, 60 nt, Canis familiaris
ucuuugguuaucuagcuguaugaguguauuggucuucauaaagcuagauaaccgaaagua

SEQ ID NO: 2359 - RNA, 61 nt, Canis familiaris
ucuuugguuaucuagcuguaugagugccacagagccgucauaaagcuagauaaccgaaagu

SEQ ID NO: 2360 - RNA, 90 nt, Monodelphis domestica
cgaggcccguuucucucuuugguuaucuagcuguaugaguguuauugagcuaucauaaagcuagauaaccgaaaguagaaaugacuuuca

SEQ ID NO: 2361 - RNA, 87 nt, Monodelphis domestica
ggaagugaguuguuaucuuugguuaucuagcuguaugaguguauuggucuucauaaagcuagauaaccgaaaguaaaaacuccuuca

SEQ ID NO: 2362 - RNA, 88 nt, Gallus gallus
uuggguugguuuuucucuuugguuaucuagcuguaugaguguaugugauaucauaaagcuagagaaccgaauguaaaaacccgcucgc

SEQ ID NO: 2363 - RNA, 87 nt, Gallus gallus
ggaagcgaguuguuaucuuugguuaucuagcuguaugaguguuuuggucuucauaaagcuagauaaccgaaaguaaaaacuccuuca

SEQ ID NO: 2364 - RNA, 76 nt, Xenopus tropicalis
guuucuaucuuugguuaucuagcuguaugaguguaaauaagccgucauaaagcuagauaaccgaaaguaggaauca

SEQ ID NO: 2365 - RNA, 74 nt, Xenopus tropicalis
guuucugucuuugguuaccuagcuguaugaguauaacuaaugucauaaagcuagacaaccgaacguauaaacca

SEQ ID NO: 2366 - RNA, 87 nt, Danio rerio
gggguuggcuguuaucuuugguuaucuagcuguaugaguguuauucauucuucauaaagcuagauaaccgaaaguaacaagaauccc

SEQ ID NO: 2367 - RNA, 136 nt, Danio rerio
gcucuccucuggugacuuuugcacuuggaggcguguuguuaucuuugguuaucuagcuguaugagugugcuggccgucauaaagcuagauaaccgaaaguaagagccgcuucuaucagcaacguauggagcauugc

SEQ ID NO: 2368 - RNA, 101 nt, Danio rerio
ucaggggguugguuucucucuuugguuaucuagcuguaugaguuauaacacugucauaaagcuagauaaccgaaaguagaaauaauucccaaaaucuuugg

SEQ ID NO: 2369 - RNA, 87 nt, Danio rerio
uggguuaguuuuucucuuugguuaucuagcuguaugaguuuaugugauaucauaaagcuagagaaccgaauguauaaacuaauucca

SEQ ID NO: 2370 - RNA, 87 nt, Danio rerio
ggaagcgaguuguuaucuuugguuaucuagcuguaugaguauuuugcacuucauaaagcuagauaaccgaaaguaaaaacugccucc

SEQ ID NO: 2371 - RNA, 88 nt, Danio rerio
ggagguaguugcuaucuuugguuaucuagcuguaugaguguuuaucugccuucauaaagcuagauaaccgaaaguagaaacguccucc

SEQ ID NO: 2372 - RNA, 84 nt, Danio rerio
ggguuaguuuuucucuuugguuaucuagcuguaugaguuaugaaauaucauaaagcuagagaaccgaaaguagaaacuauaccu

SEQ ID NO: 2373 - RNA, 87 nt, Fugu rubripes
gggguugucuguuaucuuugguuaucuagcuguaugagugacguacaaucuucauaaagcuagauaaccgaaaguaacaagaauccc

SEQ ID NO: 2374 - RNA, 72 nt, Fugu rubripes
guuguuaucuuugguuaucuagcuguaugaguguucugcucgucauaaagcuagauaaccgaaaguaaaaac

SEQ ID NO: 2375 - RNA, 82 nt, Fugu rubripes
ggagcuguguuucugucuuugguuaucuagcuguaugaguguuaaauaccugucauaaagcuagauaaccgaaaguagaaau

SEQ ID NO: 2376 - RNA, 85 nt, Fugu rubripes
ggguuaguuuuuaucuuugguuaucuagcuguaugaguuuauguaauaucauaaagcuagagaaccgaauguauaaacuaauucc

SEQ ID NO: 2377 - RNA, 95 nt, Tetraodon nigroviridis
cagagggguugucuguuaucuuugguuaucuagcuguaugagugacguacaaucuucauaaagcuagauaaccgaaaguaacaagaaucccauua

SEQ ID NO: 2378 - RNA, 72 nt, Tetraodon nigroviridis; identical to SEQ ID NO: 2374

SEQ ID NO: 2379 - RNA, 82 nt, Tetraodon nigroviridis; identical to SEQ ID NO: 2375

SEQ ID NO: 2380 - RNA, 85 nt, Tetraodon nigroviridis
ggguuaguuuuuaucuuugguuaucuagcuguaugaguuuauguaauaucauaaagcuagagaaccgaauguacaaacuaauucc

SEQ ID NO: 2381 - RNA, 74 nt, Mus musculus
ggcugcuuggguuccuggcaugcugauuugugacuugagauuaaaaucacauugccagggauuaccacgcaacc

SEQ ID NO: 2382 - RNA, 75 nt, Rattus norvegicus
cggccggcugggguuccuggggaugggauuugaugccagucacaaaucacauugccagggauuuccaacugaccc

SEQ ID NO: 2383 - RNA, 97 nt, Rattus norvegicus
cucaccugcucuggcugcuuggguuccuggcaugcugauuugugacuugagauuaaaaucacauugccagggauuaccacgcaaccaugaccuuggc

SEQ ID NO: 2384 - RNA, 73 nt, Ateles geoffroyi
ggccggcugggguuccuggggaugggauuugcugccuaucacaaaucacauugccagggauuuccaaccgacc

SEQ ID NO: 2385 - RNA, 73 nt, Saguinus labiatus; identical to SEQ ID NO: 2384

SEQ ID NO: 2386 - RNA, 73 nt, Macaca mulatta
ggccggcugggguuccuggggaugggauuugcuuccugucacaaaucacauugccagggauuuccaaccgacc

SEQ ID NO: 2387 - RNA, 97 nt, Macaca mulatta; identical to SEQ ID NO: 1630

SEQ ID NO: 2388 - RNA, 73 nt, Macaca nemestrina; identical to SEQ ID NO: 2386

SEQ ID NO: 2389 - RNA, 73 nt, Gorilla gorilla; identical to SEQ ID NO: 2386

SEQ ID NO: 2390 - RNA, 73 nt, Pan paniscus; identical to SEQ ID NO: 2386

SEQ ID NO: 2391 - RNA, 97 nt, Pan paniscus; identical to SEQ ID NO: 1630

SEQ ID NO: 2392 - RNA, 73 nt, Pan troglodytes; identical to SEQ ID NO: 2386

SEQ ID NO: 2393 - RNA, 97 nt, Pan troglodytes; identical to SEQ ID NO: 1630

SEQ ID NO: 2394 - RNA, 73 nt, Pongo pygmaeus; identical to SEQ ID NO: 2386

SEQ ID NO: 2395 - RNA, 97 nt, Pongo pygmaeus; identical to SEQ ID NO: 1630

SEQ ID NO: 2396 - RNA, 73 nt, Lemur catta
ggccggcugggguuccuggggaugggauuugcuaccuaucacaaaucacauugccagggauuuccaaccgacc

SEQ ID NO: 2397 - RNA, 52 nt, Canis familiaris
guuccuggggaugggauuugcugccugucacaaaucacauugccagggauuu

SEQ ID NO: 2398 - RNA, 54 nt, Canis familiaris
guuccuggcaugcugauuugugacuuaagauuaaaaucacauugccagggauua

SEQ ID NO: 2399 - RNA, 73 nt, Monodelphis domestica
cggcugggguuccuggggaugggauuugauuacugccacaaaucacauugccagggauuuccaacugaccacu

SEQ ID NO: 2400 - RNA, 74 nt, Monodelphis domestica
ggcugcuuggguuccuggcaugcugauuugugacuuaagaugaaaaucacauugccagggauuaccacgcagcc

SEQ ID NO: 2401 - RNA, 86 nt, Gallus gallus
uguuguggcuguuuggguuccuggcaugaugauuugugaguuaagauuaaaaucacauugccagggauuaccacauagccaugacc

SEQ ID NO: 2402 - RNA, 78 nt, Xenopus tropicalis
cugacagcgggggauuccuggagaugggauuuuauuuuggcagccaauaaaucacauugccagggauuuccaacuguc

SEQ ID NO: 2403 - RNA, 83 nt, Xenopus tropicalis
cuguggcugguaggauuccuggcagagugauuuggaaauguaugguacaaaaucacauugccagggauuuccaaucagucccg

SEQ ID NO: 2404 - RNA, 88 nt, Xenopus tropicalis
ccgguguggcuguuuggguuccuggcaugcugauuugugaguuaagauuaaaaucacauugccagggauuaccacacaaccauguccu

SEQ ID NO: 2405 - RNA, 73 nt, Bos taurus
ggccggcugggguuccuggggaugggauuugcugccugucacaaaucacauugccagggauuuccaaccgacc

SEQ ID NO: 2406 - RNA, 60 nt, Bos taurus
ggguuccuggcaugcugauuugugacuuaagauuaaaaucacauugccagggauuaccac

SEQ ID NO: 2407 - RNA, 70 nt, Sus scrofa
cggcugggguuccuggggaugggauuugcugccugucacaaaucacauugccagggauuuccaaucgacc

SEQ ID NO: 2408 - RNA, 89 nt, Danio rerio
gcuguggcggggaggguuccuggcaccgugauuugguggauaaacagaaaugaaaaucacauugccagggauuuccacuccugcacggu

SEQ ID NO: 2409 - RNA, 98 nt, Danio rerio
cucuucugccggccaggggaauuccuggcagagugauuuuuaaaccuaaugacugaaucacauugccagggauuuccaauggcucgugugacucagag

SEQ ID NO: 2410 - RNA, 78 nt, Danio rerio
ccagcuggagggauuccuggcagagugauuugggauuauaucauaaaaucacauugccagggauuuccaaccagcugu

SEQ ID NO: 2411 - RNA, 81 nt, Danio rerio
guggcuguguggguucuuggcaugcugauuugugacuguaguaaaaaaaaaucacauugccagggauuaccacacuaccac

SEQ ID NO: 2412 - RNA, 88 nt, Fugu rubripes
gcuguggcggggaggguuccuggcaccgugauuugaugcacaaagacaaacaaaaaucacauugccagggauuuccacccuuucacag

SEQ ID NO: 2413 - RNA, 77 nt, Fugu rubripes
agcuggagggauuccuggcagagugauuuggcugugauguaauguaaaucacauugccagggauuuccaaccagcug

SEQ ID NO: 2414 - RNA, 80 nt, Fugu rubripes
ucuguuggccagggggauuccuggcagagugauuuuuagacuacaggacugaaucacauugccagggauuuccaauggcu

SEQ ID NO: 2415 - RNA, 73 nt, Fugu rubripes
ggcugugaggguuccuggcgugcugauuugugacuuaugauaaaaucacauugccagggauuaccacacagcc

SEQ ID NO: 2416 - RNA, 88 nt, Tetraodon nigroviridis; identical to SEQ ID NO: 2412

SEQ ID NO: 2417 - RNA, 76 nt, Tetraodon nigroviridis
agcuggagggauuccuggcagagugauuuggcugugauguaauguaaaucacauugccagggauuuccaaccagcu

SEQ ID NO: 2418 - RNA, 81 nt, Tetraodon nigroviridis
ucuguuggccaggggaauuccuggcagagugauuuuugagacuacaggacugaaucacauugccagggauuuccaauggcu

SEQ ID NO: 2419 - RNA, 73 nt, Tetraodon nigroviridis
ggcugugaggguuccuggcgugcugauuugugaccuaugauaaaaucacauugccagggauuaccacaccgcc

SEQ ID NO: 2420 - RNA, 73 nt, Mus musculus
aggugcagagcuuagcugauuggugaacagugauugguuuccgcuuuguucacaguggcuaaguucugcaccu

SEQ ID NO: 2421 - RNA, 87 nt, Rattus norvegicus
uggccuguggagcagggcuuagcugcuugugagcaaggucuacagcaaagucguguucacaguggcuaaguuccgcccccuggaccc

SEQ ID NO: 2422 - RNA, 97 nt, Rattus norvegicus; identical to SEQ ID NO: 1631

SEQ ID NO: 2423 - RNA, 78 nt, Ateles geoffroyi
cugaggagcagggcuuagcugcuugugagcaggguucacuccaagucauguucacaguggcuaaguuccgccccccag

SEQ ID NO: 2424 - RNA, 78 nt, Saguinus labiatus; identical to SEQ ID NO: 2423

SEQ ID NO: 2425 - RNA, 78 nt, Macaca mulatta
cugaggagcagggcuuagcugcuugugagcaggguccacaccaagucguguucacaguggcuaaguuccgccccccag

SEQ ID NO: 2426 - RNA, 97 nt, Macaca mulatta; identical to SEQ ID NO: 1631

SEQ ID NO: 2427 - RNA, 79 nt, Macaca nemestrina
cugaggagcagggcuuagcugcuugugagcaggguccacaccaagucguguucacaguggcuaaguuccgcccccccag

SEQ ID NO: 2428 - RNA, 78 nt, Gorilla gorilla; identical to SEQ ID NO: 2425

SEQ ID NO: 2429 - RNA, 78 nt, Pan paniscus; identical to SEQ ID NO: 2425

SEQ ID NO: 2430 - RNA, 78 nt, Pan troglodytes; identical to SEQ ID NO: 2425

SEQ ID NO: 2431 - RNA, 78 nt, Pongo pygmaeus
cugaggagcagggcuuagcugcuugugagcaggguccacaccaaguuguguucacaguggcuaaguuccgccccccag

SEQ ID NO: 2432 - RNA, 78 nt, Lemur catta
cugaggagcagggcuuagcugcuugugagcaggguccacaccaaaucauguucacaguggcuaaguuccgccccccgg

SEQ ID NO: 2433 - RNA, 60 nt, Canis familiaris
gggcuuagcugcuugugagcagaguccacaccaagucguguucacaguggcuaaguuccg

SEQ ID NO: 2434 - RNA, 63 nt, Canis familiaris
agagcuuagcugauuggugaacagugacugguuuccgcuuuguucacaguggcuaaguucugc

SEQ ID NO: 2435 - RNA, 86 nt, Monodelphis domestica
uggcuugaggagcaggacuuagcugccuugugaacagagucagcaucauauuguguucacaguggcuaaguuccgcuccccuugcc

SEQ ID NO: 2436 - RNA, 97 nt, Monodelphis domestica
accucucugacaaggugcagagcuuagccgauuggugaacagucacugauuuccucuuuguucacaguggcuaaguucugcaccugaagagaagggg

SEQ ID NO: 2437 - RNA, 97 nt, Gallus gallus
accucucuggugaggugcagagcuuagcugauuggugaacagugauuguuucccucuuuguucacaguggcuaaguucugcaccugaagagaaggug

SEQ ID NO: 2438 - RNA, 76 nt, Xenopus tropicalis
cggcggcccagggcuuagcuguauugugagcacugucacucucgcaccuguucacaguggcuaaguuccgcgccuc

SEQ ID NO: 2439 - RNA, 96 nt, Xenopus tropicalis
accuuucuaccaaggugcagagcuuagcugauuggugaacagugauugauucccucuuuguucacaguggcuaaguucugcaccugaagagagggc

SEQ ID NO: 2440 - RNA, 82 nt, Xenopus tropicalis
cucuagagaggcaggacuuagcuggcucugugaacaggucuugugugucaauguucacaguggcuaaguuccaccccacugg

SEQ ID NO: 2441 - RNA, 82 nt, Xenopus tropicalis; identical to SEQ ID NO: 2440

SEQ ID NO: 2442 - RNA, 78 nt, Bos taurus
uggccuggggagcagggcuuagcugcuugugagcagguccacaucaaaucguguucacaguggcuaaguuccgccccc

SEQ ID NO: 2443 - RNA, 97 nt, Bos taurus
accucucugacgaggugcagagcuuagcugauuggugaacagugacugguuuccgcuuuguucacaguggcuaaguucugcaccugaagagaaggug

SEQ ID NO: 2444 - RNA, 82 nt, Sus scrofa
uggccuggggagcagggcuuagcugcuugugagcagguccacagcaagucguguucacaguggcuaaguuccgcccccugga

SEQ ID NO: 2445 - RNA, 131 nt, Danio rerio
ucuggauaugaugucugcugaaguuucgugaggugcaggacuuagcucacucugugaacagaucucggauauccuauguucacaguggcuaaguuccgcuccucugaggcccacacucgaaaucagccagg

SEQ ID NO: 2446 - RNA, 91 nt, Danio rerio
ucuuuucuagcaggugcagagcuuagcugauuggugaacagugauugaacucuuuguucacaguggcuaaguucugcaucugaggagagga

SEQ ID NO: 2447 - RNA, 88 nt, Danio rerio
gguuguguggugucaggacuuaacccacuugugaacaaugcaucgaacuucaauguucacagugguuaaguucugccgccccuagacc

SEQ ID NO: 2448 - RNA, 89 nt, Danio rerio
uucugagcgggugcagagcuuggcugauuggugaacgugcauggcuuguguuuuuguucacaguggcuaaguucuucacccgaaaagaa

SEQ ID NO: 2449 - RNA, 106 nt, Danio rerio
gucaucacucgcucacggcgcagagcuuagcuaaucggugagcauugaucccuuaagaaaacuguucacaguggcuaaguucagugucuggagugaacgggaugac

SEQ ID NO: 2450 - RNA, 74 nt, Fugu rubripes
aggcacagagcuuagcugauuggugaacagugauugauuuccucuuuguucacaguggcuaaguucugcaccug

SEQ ID NO: 2451 - RNA, 78 nt, Fugu rubripes
ggcuguguggcggcaggacuuaacccacaugugagcagugagugugugccauguucacagugguuaaguucugccgcc

SEQ ID NO: 2452 - RNA, 100 nt, Fugu rubripes
cacuugcuaaaggcaccgagcuuagcuaauuggugagcauugaucccugcuauguguuguucacaguggcuaaguucagugccugaggugaaauaguuga

SEQ ID NO: 2453 - RNA, 74 nt, Tetraodon nigroviridis; identical to SEQ ID NO: 2450

SEQ ID NO: 2454 - RNA, 76 nt, Tetraodon nigroviridis
ggcugugcggcggcaggacuuaacccacaugugaacagugagugugccguguucacagugguuaaguucugccgcc

SEQ ID NO: 2455 - RNA, 83 nt, Tetraodon nigroviridis
cucuugcugaaggcacagagcuuagcuaauuggugagcauugaucccugcuauguguuguucacaguggcuaaguucagugcc

SEQ ID NO: 2456 - RNA, 86 nt, Mus musculus
ggucccuaccuucaaggagcucacagucuauugaguugccuuucugauucucccacuagauugugagcugcuggagggcaggcacu

SEQ ID NO: 2457 - RNA, 86 nt, Rattus norvegicus
ggucccuacccgcaaggagcucacagucuauugaguuccuuuucugauucucccacuagauugugagcuccuggagggcaggcacu

SEQ ID NO: 2458 - RNA, 86 nt, Ateles geoffroyi
gguccuugcccucaaggagcucacagucuauugaguugccuuucugacuuucccacuagauugugagcuccuggagggcaggcacu

SEQ ID NO: 2459 - RNA, 86 nt, Lagothrix lagotricha; identical to SEQ ID NO: 2458

SEQ ID NO: 2460 - RNA, 86 nt, Saguinus labiatus
gguccuugcccucaaggagcucacagucuauugaguugccuuucuaacuuucccacuagauuguaagcuccuggagggcaggcacu

SEQ ID NO: 2461 - RNA, 86 nt, Macaca mulatta
gguccuugcccucaaggagcucacagucuauugaguuuccuuugugacuuucccacuagauugugagcuccuggagggcaggcacu

SEQ ID NO: 2462 - RNA, 86 nt, Macaca nemestrina
gguccuugcccucaaggagcucacagucuauugaguuuccuuucugacuuucccacuagauugugagcuccuggagggcaggcacu

SEQ ID NO: 2463 - RNA, 86 nt, Gorilla gorilla; identical to SEQ ID NO: 1632

SEQ ID NO: 2464 - RNA, 86 nt, Pan paniscus; identical to SEQ ID NO: 1632

SEQ ID NO: 2465 - RNA, 86 nt, Pan troglodytes; identical to SEQ ID NO: 1632

SEQ ID NO: 2466 - RNA, 86 nt, Pongo pygmaeus
gguccuugcccucaaggagcucacagucuauugaguuaccuuucugauuuucccacuagauugugagcuccuggagggcaggcacu

SEQ ID NO: 2467 - RNA, 86 nt, Sus scrofa
gguccuugcccucaaggagcucacacucuauugaguugccuuucugucuuccccacuagauugugagcuccuggagggcaggcacu

SEQ ID NO: 2468 - RNA, 71 nt, Macaca mulatta; identical to SEQ ID NO: 1633

SEQ ID NO: 2469 - RNA, 71 nt, Macaca nemestrina; identical to SEQ ID NO: 1633

SEQ ID NO: 2470 - RNA, 71 nt, Gorilla gorilla; identical to SEQ ID NO: 1633

SEQ ID NO: 2471 - RNA, 71 nt, Pan paniscus; identical to SEQ ID NO: 1633

SEQ ID NO: 2472 - RNA, 71 nt, Pan troglodytes; identical to SEQ ID NO: 1633

SEQ ID NO: 2473 - RNA, 71 nt, Pongo pygmaeus; identical to SEQ ID NO: 1633

SEQ ID NO: 2474 - RNA, 72 nt, Danio rerio
gaagagauggcaagauguuggcauagcuguuaauguuuaugggccugcuaugccuccauauugccauuucug

SEQ ID NO: 2475 - RNA, 69 nt, Rattus norvegicus
ccguggugcauuguaguugcauugcauguucuggcaguaccugugcaauguuuccacagugcaucacgg

SEQ ID NO: 2476 - RNA, 69 nt, Macaca mulatta
cugcggugcauuguaguugcauugcauguucuggugguacccaugcaauguuuccacagugcauuacag

SEQ ID NO: 2477 - RNA, 96 nt, Macaca mulatta
gcgggcggccccgcggugcauugcuguugcauugcacgugugugaggcgggugcagugccucggcagugcagcccggagccggccccuggcaccgc

SEQ ID NO: 2478 - RNA, 69 nt, Macaca nemestrina; identical to SEQ ID NO: 2476

SEQ ID NO: 2479 - RNA, 69 nt, Gorilla gorilla
cuguggugcauuguaguugcauugcauguucuggugguacccaugcaauguuuccacagugcaucacag

SEQ ID NO: 2480 - RNA, 69 nt, Pan paniscus; identical to SEQ ID NO: 2479

SEQ ID NO: 2481 - RNA, 69 nt, Pan troglodytes; identical to SEQ ID NO: 2479

SEQ ID NO: 2482 - RNA, 69 nt, Pongo pygmaeus
cugcggugcauuguaguugcauugcauguucuggugguacccaugcaauguuuccacagugcaucacag

SEQ ID NO: 2483 - RNA, 61 nt, Canis familiaris
gugcauuguaguugcauugcauguucuggcgguacccgugcaauguuuccacagugcauca

SEQ ID NO: 2484 - RNA, 69 nt, Gallus gallus
cuguagugcauuguaguugcauugcaugugcuggcaguaacugugcaauguuccugcagugcaguacag

SEQ ID NO: 2485 - RNA, 68 nt, Xenopus tropicalis
cuguggugcauuguaguugcauugcaugugauaucagcggugugcaaugugccugcagugcaacacag

SEQ ID NO: 2486 - RNA, 69 nt, Xenopus tropicalis
cccuggugcauuguuguugcauugcaugucaccuuggacguugugcaauguuucuucagugcaguaugg

SEQ ID NO: 2487 - RNA, 106 nt, Mus musculus
ccaguaccaucugcuuggccgauuuuggcacuagcacauuuuugcuugugucucuccgcugugagcaaucauguguagugccaauaugggaaaagcgggcugcugc

SEQ ID NO: 2488 - RNA, 106 nt, Rattus norvegicus
ccaguaccaucugcuuggccgauuuuggcacuagcacauuuuugcuugugucucuccgcucugagcaaucaugugcagugccaauaugggaaaagcgggcugcugc

SEQ ID NO: 2489 - RNA, 76 nt, Saguinus labiatus
uggccgauuuuggcacuagcacauuuuugcuugucucuccgcucugagcaaucaugugcagugccaauaugggaaa

SEQ ID NO: 2490 - RNA, 78 nt, Macaca mulatta; identical to SEQ ID NO: 1635

SEQ ID NO: 2491 - RNA, 78 nt, Macaca nemestrina; identical to SEQ ID NO: 1635

SEQ ID NO: 2492 - RNA, 78 nt, Gorilla gorilla; identical to SEQ ID NO: 1635

SEQ ID NO: 2493 - RNA, 78 nt, Pan paniscus; identical to SEQ ID NO: 1635

SEQ ID NO: 2494 - RNA, 78 nt, Pan troglodytes; identical to SEQ ID NO: 1635

SEQ ID NO: 2495 - RNA, 97 nt, Monodelphis domestica
gaugucugcuuggcccguuuuggcacuagcacauuuuugcuucugucucucugcucugagcaaucauguguagugccaauaugggaaaagcaagaug

SEQ ID NO: 2496 - RNA, 75 nt, Xenopus tropicalis
ggccugcuuuggcacuagcacauuuuugcuuuuguacauauacuuugagcaauuauguguagugccaauauagga

SEQ ID NO: 2497 - RNA, 125 nt, Danio rerio
gcugggcgcucuucuuugccuguuuuggcacuagcacauuuuugcuuuuuuauauauaccuugagcaauuauguguagugccaauaugggacaagacagacaugcuacuuaaaaaaaaaaucagc

SEQ ID NO: 2498 - RNA, 102 nt, Fugu rubripes
cucuucuucgcccauuuuggcacuagcacauuuuugcuucuguauguauacuuugagcaauuauguguagugccaauauaggagaagacagacuuucaaccu

SEQ ID NO: 2499 - RNA, 78 nt, Tetraodon nigroviridis
uugcccauuuuggcacuagcacauuuuugcuucuguauauauacuuugagcaauuauguguagugccaauauaggaga

SEQ ID NO: 2500 - RNA, 80 nt, Mus musculus
ccuguugccacaaacccguagauccgaacuugugcugauucugcacacaagcuugugucuauagguaugugucuguuagg

SEQ ID NO: 2501 - RNA, 80 nt, Rattus norvegicus
ccuguugccacaaacccguagauccgaacuugugcugaccaugcacacaagcuugugucuauagguaugugucuguuagg

SEQ ID NO: 2502 - RNA, 80 nt, Ateles geoffroyi
ccuguugccacaaacccguagauccgaacuugugguguuagucugcacaagcuugugucuauagguaugugucuguuagg

SEQ ID NO: 2503 - RNA, 80 nt, Lagothrix lagotricha; identical to SEQ ID NO: 2502

SEQ ID NO: 2504 - RNA, 80 nt, Saguinus labiatus
ccuguugccacaaacccguagauccgaacuugugguguuaaugugcacaagcuugugucuauagguaugugucuguuagg

SEQ ID NO: 2505 - RNA, 80 nt, Macaca mulatta
ccuguugccacaaacccguagauccgaacuugugguauuaguccgcacaagcuugugucuauagguaugugucuuuuagg

SEQ ID NO: 2506 - RNA, 80 nt, Gorilla gorilla; identical to SEQ ID NO: 1636

SEQ ID NO: 2507 - RNA, 80 nt, Pan paniscus; identical to SEQ ID NO: 1636

SEQ ID NO: 2508 - RNA, 80 nt, Pan troglodytes; identical to SEQ ID NO: 1636

SEQ ID NO: 2509 - RNA, 80 nt, Pongo pygmaeus; identical to SEQ ID NO: 1636

SEQ ID NO: 2510 - RNA, 80 nt, Monodelphis domestica
ccuguugccacaaacccguagauccgaacuuguggugauauuccacacaagcuugugucuauagguaugugucugucagg

SEQ ID NO: 2511 - RNA, 80 nt, Gallus gallus
ccuguugccacaaacccguagauccgaacuuguggucauauuccacacaagcuuguaucuauagguaugugucugucugg

SEQ ID NO: 2512 - RNA, 76 nt, Xenopus tropicalis
guugccauaaacccguagauccgaacuugugcugugccccucucacaagcucgagugugcgggucugugucggcuu

SEQ ID NO: 2513 - RNA, 96 nt, Danio rerio
gaagagaccugccugcugacacaaacccguagauccgaacuuguggugacuguccacacaagcuuguaucuauagguaucugucuguguggccuuc

SEQ ID NO: 2514 - RNA, 75 nt, Danio rerio
agcugccacaaacccguagauccgaacuuguggugucucugugcacaagcucgugucuauagguaugugucugcg

SEQ ID NO: 2515 - RNA, 63 nt, Fugu rubripes
cacaaacccguagauccgaacuuguggugacuggccgcacaagcucguaucuauagguaugug

SEQ ID NO: 2516 - RNA, 63 nt, Tetraodon nigroviridis; identical to SEQ ID NO: 2515

SEQ ID NO: 2517 - RNA, 65 nt, Mus musculus
augucaaagugcuaacagugcagguagcuuuuugaguucuacugcagugccagcacuucuuacau

SEQ ID NO: 2518 - RNA, 82 nt, Rattus norvegicus
ccugcugggacuaaagugcugacagugcagauagugguccucucugugcuaccgcacuguggguacuugcugcuccagcagg

SEQ ID NO: 2519 - RNA, 81 nt, Ateles geoffroyi
ccuuggccauguaaaagugcuuacagugcagguagcuuuuugagaucuacugcaaugcaagcacuucuuacauuaccaugg

SEQ ID NO: 2520 - RNA, 82 nt, Ateles geoffroyi
ccugccggggcuaaagugcugacagugcagauagugguccucuccgugcuaccgcacuguggguacuugcugcuccagcagg

SEQ ID NO: 2521 - RNA, 81 nt, Lagothrix lagotricha
ccugccggggcuaaagugcugacagugcagauaguguccucuccgugcuaccgcacuguggguacuugcugcuccagcagg

SEQ ID NO: 2522 - RNA, 81 nt, Saguinus labiatus; identical to SEQ ID NO: 2519

SEQ ID NO: 2523 - RNA, 82 nt, Saguinus labiatus; identical to SEQ ID NO: 2520

SEQ ID NO: 2524 - RNA, 81 nt, Macaca mulatta; identical to SEQ ID NO: 2519

SEQ ID NO: 2525 - RNA, 82 nt, Macaca mulatta
ccugcuggggcuaaagugcugacagugcagauagugguccucuccgugcuaccgcacuguggguacuugcugcuccagcagg

SEQ ID NO: 2526 - RNA, 81 nt, Macaca nemestrina; identical to SEQ ID NO: 2519

SEQ ID NO: 2527 - RNA, 82 nt, Macaca nemestrina; identical to SEQ ID NO: 2525

SEQ ID NO: 2528 - RNA, 81 nt, Gorilla gorilla; identical to SEQ ID NO: 2519

SEQ ID NO: 2529 - RNA, 82 nt, Gorilla gorilla; identical to SEQ ID NO: 2520

SEQ ID NO: 2530 - RNA, 81 nt, Pan paniscus; identical to SEQ ID NO: 2519

SEQ ID NO: 2531 - RNA, 82 nt, Pan paniscus; identical to SEQ ID NO: 2520

SEQ ID NO: 2532 - RNA, 81 nt, Pan troglodytes; identical to SEQ ID NO: 2519

SEQ ID NO: 2533 - RNA, 82 nt, Pan troglodytes; identical to SEQ ID NO: 2520

SEQ ID NO: 2534 - RNA, 81 nt, Pongo pygmaeus; identical to SEQ ID NO: 2519

SEQ ID NO: 2535 - RNA, 82 nt, Pongo pygmaeus; identical to SEQ ID NO: 2520

SEQ ID NO: 2536 - RNA, 59 nt, Canis familiaris
uaaagugcugacagugcagauagcgguccuccgugcuaccgcacuguggguacuugcug

SEQ ID NO: 2537 - RNA, 81 nt, Gallus gallus
ccuugaguugugcaaaagugcuuacagugcagguagagcucagcaccuacugcaguauaagcacuucuggcaugaccgugg

SEQ ID NO: 2538 - RNA, 63 nt, Xenopus tropicalis
ugcaaaagugcuuauagugcagguagaauuuaaaccuacugcaccauaagcacuuccugcauc

SEQ ID NO: 2539 - RNA, 81 nt, Bos taurus; identical to SEQ ID NO: 2519

SEQ ID NO: 2540 - RNA, 81 nt, Sus scrofa
ccuuggccguguaaaagugcuuacagugcagguagcuuuuugagaucuacugcaaugcaagcacuucuuacauuaccaugg

SEQ ID NO: 2541 - RNA, 73 nt, Rattus norvegicus
ugacagcacauuauuacuuuugguacgcgcugugacacuucaaacucguaccgugaguaauaaugcgugguca

SEQ ID NO: 2542 - RNA, 84 nt, Gallus gallus
gcuggugacggcccauuauuacuuuugguacgcgcugugacacuucaaacucguaccgugaguaauaaugcgcuguggucagca

SEQ ID NO: 2543 - RNA, 69 nt, Xenopus tropicalis
ggcugugcauuauuacuuuugguacgcgcugugucacaucaaacucguaccgugaguaauaaugcgcag

SEQ ID NO: 2544 - RNA, 73 nt, Bos taurus
ugacgggacauuauuacuuuugguacgcgcugugacacuucaaacucguaccgugaguaauaaugcgcuguca

SEQ ID NO: 2545 - RNA, 101 nt, Danio rerio
gagccauuuuaacugcuucacaguccauuauuacuuuugguacgcgcuaggccagacucaaacucguaccgugaguaauaaugcacuguggcaguggguuu

SEQ ID NO: 2546 - RNA, 70 nt, Mus musculus
ccagccugcugaagcucagagggcucugauucagaaagaucaucggauccgucugagcuuggcuggucgg

SEQ ID NO: 2547 - RNA, 97 nt, Rattus norvegicus
uuugaucacugucuccagccugcugaagcucagagggcucugauucagaaagaucaucggauccgucugagcuuggcuggucggaagucucaucauc

SEQ ID NO: 2548 - RNA, 97 nt, Ateles geoffroyi; identical to SEQ ID NO: 1639

SEQ ID NO: 2549 - RNA, 97 nt, Lagothrix lagotricha; identical to SEQ ID NO: 1639

SEQ ID NO: 2550 - RNA, 97 nt, Saguinus labiatus; identical to SEQ ID NO: 1639

SEQ ID NO: 2551 - RNA, 97 nt, Macaca mulatta
ugugaucacugucuccagccugcugaagcucagagggcucugauucagaaagaucaucggauccgucugagcuuggcuggucggaagucuccucauc

SEQ ID NO: 2552 - RNA, 97 nt, Macaca nemestrina; identical to SEQ ID NO: 2551

SEQ ID NO: 2553 - RNA, 97 nt, Pan troglodytes; identical to SEQ ID NO: 1639

SEQ ID NO: 2554 - RNA, 97 nt, Pongo pygmaeus; identical to SEQ ID NO: 1639

SEQ ID NO: 2555 - RNA, 60 nt, Canis familiaris
ccugcugaagcucagagggcucugauucagaaagaucaucggauccgucugagcuuggcu

SEQ ID NO: 2556 - RNA, 95 nt, Bos taurus
ugaucacugucuccagccugcugaagcucagagggcucugauucagaaagaucaucggauccgucugagcuuggcuggucggaagucuccucauc

SEQ ID NO: 2557 - RNA, 82 nt, Rattus norvegicus
ugagcuguuggauucggggccguagcacugucugagagguuuacauuucucacagugaaccggucucuuuuucagcugcuuc

SEQ ID NO: 2558 - RNA, 84 nt, Rattus norvegicus
ugugcagugggaaggggggccgaugcacuguaagagagugaguagcaggucucacagugaaccggucucuuucccuacuguguc

SEQ ID NO: 2559 - RNA, 82 nt, Ateles geoffroyi; identical to SEQ ID NO: 2557

SEQ ID NO: 2560 - RNA, 82 nt, Saguinus labiatus; identical to SEQ ID NO: 2557

SEQ ID NO: 2561 - RNA, 82 nt, Macaca mulatta; identical to SEQ ID NO: 2557

SEQ ID NO: 2562 - RNA, 84 nt, Macaca mulatta; identical to SEQ ID NO: 1640

SEQ ID NO: 2563 - RNA, 82 nt, Pan paniscus; identical to SEQ ID NO: 2557

SEQ ID NO: 2564 - RNA, 82 nt, Pan troglodytes; identical to SEQ ID NO: 2557

SEQ ID NO: 2565 - RNA, 82 nt, Pongo pygmaeus; identical to SEQ ID NO: 2557

SEQ ID NO: 2566 - RNA, 56 nt, Canis familiaris
cggggccguagcacugucugagagguuuacauuucucacagugaaccggucucuuu

SEQ ID NO: 2567 - RNA, 58 nt, Canis familiaris
gggggccgauacacuguacgagagugaguagcaggucucacagugaaccggucucuuu

SEQ ID NO: 2568 - RNA, 84 nt, Monodelphis domestica
ugugcagcaggaaggggggccguuacacugucagagagugaguagcaggucucacagugaaccggucucuuucccugcuguggc

SEQ ID NO: 2569 - RNA, 82 nt, Gallus gallus
ugagcuguugaauucggggccguaacacugucugagagguuuauauuucucacagugaaccggucucuuuuucagcugcuuc

SEQ ID NO: 2570 - RNA, 84 nt, Gallus gallus
uguccagcuggaaggggggccguuacacuguaagagagugaguagcaggucucacagugaaccggucucuuuuccugcuguguc

SEQ ID NO: 2571 - RNA, 83 nt, Xenopus tropicalis
ugagcggcuggaaccgggcccggagcgcugucugagaggguuuaaguuucucacagugaaccggucucuuuuucagucucuuc

SEQ ID NO: 2572 - RNA, 80 nt, Xenopus tropicalis
gugcagcuggaacgggggccguuacacuguaagagagugaguaguaggucucacagugaaccggucucuuuucuuacugu

SEQ ID NO: 2573 - RNA, 82 nt, Bos taurus; identical to SEQ ID NO: 2557

SEQ ID NO: 2574 - RNA, 82 nt, Sus scrofa; identical to SEQ ID NO: 2557

SEQ ID NO: 2575 - RNA, 98 nt, Danio rerio
uggaggaggagugcugggagacggggccguggcacuguaugagauucauguaggcuuucucacagugaaccggucucuuuuuccagcccucacugaca

SEQ ID NO: 2576 - RNA, 123 nt, Danio rerio
ucugcucaugggucugucaguaguaggacagggggccguuucuacugucagagaugcugccacucgucucacagugaaccggucucuuuuccugcuauucacuucugcaauaauaugagcaga

SEQ ID NO: 2577 - RNA, 85 nt, Fugu rubripes
gagagccuggguacggggccgggacgcuguuugagaguccucuaugaaucucacagugaaccggucucuuuuccagccccucacu

SEQ ID NO: 2578 - RNA, 72 nt, Fugu rubripes
gaagagggggccguuacacugucagagauguagucugagggucucacagugaaccggucucuuuuccugcug

SEQ ID NO: 2579 - RNA, 72 nt, Tetraodon nigroviridis
gcugcauacggggccgggacgcuguuugagaguccacuaugaaucucacagugaaccggucucuuuugcagc

SEQ ID NO: 2580 - RNA, 72 nt, Tetraodon nigroviridis
gaggagggggccguuacacugucagagauguagucugagggucucacagugaaccggucucuuuuccugcug

SEQ ID NO: 2581 - RNA, 72 nt, Rattus norvegicus
ugggucuuuuugcggucugggcuugcuguucucuccacaguagucaggaagcccuuaccccaaaaaguaucu

SEQ ID NO: 2582 - RNA, 97 nt, Rattus norvegicus
agacugcccuucgcgaaucuuuuugcggucugggcuugcuguacauaacucaauagccggaagcccuuaccccaaaaagcauucgcggagggcgcgc

SEQ ID NO: 2583 - RNA, 65 nt, Canis familiaris
cuuuuugcggucugggcuugcuguuccucucaacaguagucaggaagcccuuaccccaaaaagua

SEQ ID NO: 2584 - RNA, 63 nt, Canis familiaris
cuuuuugcggucugggcuugcuguacauaacucgauagccggaagcccuuaccccaaaaagca

SEQ ID NO: 2585 - RNA, 74 nt, Monodelphis domestica
uggaucuuuuugcggucugggcuugcuguuccuuaaaucaguagucaggaagcccuuaccccaaaaaguaucua

SEQ ID NO: 2586 - RNA, 90 nt, Xenopus tropicalis
guccuucucaaaucuuuuugcggucugggcuugcuguauguaaauaccuagccgggaagcccuuaccccaaaaagcauuugcggagggcg

SEQ ID NO: 2587 - RNA, 82 nt, Xenopus tropicalis
ucucaaagcuuuuugcggucugggcuugcuguucucaaucaaaguauccaggaagcccuuaucccaaaaagaauuugcgagg

SEQ ID NO: 2588 - RNA, 90 nt, Danio rerio
guccuuuucaggucuuuuugcggucugggcuugcuguuccuugaaccaguagccaggaagcccuuaccccaaaaaguaucugcagaggac

SEQ ID NO: 2589 - RNA, 87 nt, Danio rerio
gucuuucacgaaucuuuuugcggucugggcuugcuguucucaacuaucaaugggaagcccuuaccccaaaaagcauuugcggagggc

SEQ ID NO: 2590 - RNA, 89 nt, Fugu rubripes
guccuucacgaaucuuuuugcggucugggcuugcuguucuuuacugguaaucugggaagcccuuaccccaaaaagcauuugcggaggac

SEQ ID NO: 2591 - RNA, 73 nt, Fugu rubripes
ugggucuuuuugcggucugggcuugcuguuccuaaggcaguagccaggaagcccuuaccccaaaaaguaucug

SEQ ID NO: 2592 - RNA, 85 nt, Tetraodon nigroviridis
guccuucacgaaucuuuuugcggucugggcuugcuguucucugcucacccggaagcccuuaccccaaaaagcauuugcggggggc

SEQ ID NO: 2593 - RNA, 71 nt, Tetraodon nigroviridis
gggucuuuuugcggucugggcuugcuguuccuaaggcaguagccaggaagcccuuaccccaaaaaguaucu

SEQ ID NO: 2594 - RNA, 88 nt, Ateles geoffroyi; identical to SEQ ID NO: 1643

SEQ ID NO: 2595 - RNA, 88 nt, Lagothrix lagotricha; identical to SEQ ID NO: 1643

SEQ ID NO: 2596 - RNA, 88 nt, Saguinus labiatus; identical to SEQ ID NO: 1643

SEQ ID NO: 2597 - RNA, 88 nt, Macaca nemestrina; identical to SEQ ID NO: 1643

SEQ ID NO: 2598 - RNA, 88 nt, Gorilla gorilla; identical to SEQ ID NO: 1643

SEQ ID NO: 2599 - RNA, 88 nt, Pan paniscus; identical to SEQ ID NO: 1643

SEQ ID NO: 2600 - RNA, 88 nt, Pan troglodytes; identical to SEQ ID NO: 1643

SEQ ID NO: 2601 - RNA, 87 nt, Monodelphis domestica
caaugcuuugcuaaagcugguaaaauggaaccaaaucaccuauucaauggauuugguccccuucaaccagcuguagcuaugcauuga

SEQ ID NO: 2602 - RNA, 87 nt, Gallus gallus
caaugcuuugcuaaagcugguaaaauggaaccaaaucaccucuucaauggauuugguccccuucaaccagcuguagcuaugcauuga

SEQ ID NO: 2603 - RNA, 96 nt, Gallus gallus
gugaggccaaaugcuuugcuaaagcugguaaaauggaaccaaaucaacuguucaauggauuugguccccuucaaccagcuguagcugugcauugau

SEQ ID NO: 2604 - RNA, 79 nt, Gallus gallus
ugccuuccuggggcugguaaaaaggaaccagaucaacuacaacuggauuugguccccuucaaccagcugcaguggggca

SEQ ID NO: 2605 - RNA, 86 nt, Xenopus laevis
cagugcuuugcuaaagcugguaaaauggaaccaaaucaccucuucaauggauuugguccccuucaaccagcuguaggauugcauug

SEQ ID NO: 2606 - RNA, 86 nt, Xenopus tropicalis
caaugcuuugcuaaagcugguaaaauggaaccaaaucaccucuucaauggauuugguccccuucaaccagcuguaggauugcauug

SEQ ID NO: 2607 - RNA, 76 nt, Xenopus tropicalis
cugguugcggcuggugaaaaggaaccacaucaacccagaaaaaggauuugguccccuucaaccagccgcaacuggu

SEQ ID NO: 2608 - RNA, 84 nt, Gallus gallus
cucugcucuggcuggucaaacggaaccaagcccgucuucuucggagguuugguccccuucaaccagcuauagcaguguugaaaa

SEQ ID NO: 2609 - RNA, 75 nt, Xenopus tropicalis
cugcuauggcuggucaaacggaaccaaguccgucuuccuuagagguuugguccccuucaaccagcuauugcagua

SEQ ID NO: 2610 - RNA, 97 nt, Mus musculus
cgcucugcuguggccuauggcuuuucauuccuaugugauugcugcuccgaacucauguagggcuaaaagccaugggcuacagugaggggcaagcucc

SEQ ID NO: 2611 - RNA, 100 nt, Rattus norvegicus
agauaaauucacucuagugcuuuauggcuuuuuauuccuaugugaucguaauaaagucucauguagggauggaagccaugaaauacauugugaaaauuca

SEQ ID NO: 2612 - RNA, 97 nt, Rattus norvegicus
cgcucugcuguggccuauggcuuuucauuccuaugugauugcuguuccgaacucauguagggcuaaaagccaugggcuacagugaggggcaagcucc

SEQ ID NO: 2613 - RNA, 90 nt, Ateles geoffroyi
aggccucgcuguucucuauggcuuuuuauuccuaugugauucuacugcucacucauauagggauuggagccguggcgcacggcggggaca

SEQ ID NO: 2614 - RNA, 100 nt, Ateles geoffroyi
agauaaauucacucuagugcuuuauggcuuuuuauuccuaugugauaguaauaaagucucauguagggauggaagccaugaaauacauugugaaaaauca

SEQ ID NO: 2615 - RNA, 90 nt, Lagothrix lagotricha; identical to SEQ ID NO: 2613

SEQ ID NO: 2616 - RNA, 100 nt, Lagothrix lagotricha
agauaaauucacucuagugcuuuauggcuuuuuauuccuaugugauaguaauaaagucucauguagggauggaagccaugcaccacauaauguaaaauca

SEQ ID NO: 2617 - RNA, 90 nt, Macaca mulatta; identical to SEQ ID NO: 2613

SEQ ID NO: 2618 - RNA, 100 nt, Macaca mulatta; identical to SEQ ID NO: 2614

SEQ ID NO: 2619 - RNA, 97 nt, Macaca mulatta; identical to SEQ ID NO: 1646

SEQ ID NO: 2620 - RNA, 100 nt, Gorilla gorilla; identical to SEQ ID NO: 2614

SEQ ID NO: 2621 - RNA, 90 nt, Pan paniscus
aggccucgcuguucucuauggcuuuuuauuccuaugugauucuacugcucacucauauagggauuggagccguggcgcacggcggggacg

SEQ ID NO: 2622 - RNA, 100 nt, Pan paniscus; identical to SEQ ID NO: 2614

SEQ ID NO: 2623 - RNA, 100 nt, Pan troglodytes; identical to SEQ ID NO: 2614

SEQ ID NO: 2624 - RNA, 100 nt, Pongo pygmaeus; identical to SEQ ID NO: 2614

SEQ ID NO: 2625 - RNA, 100 nt, Monodelphis domestica
agauaaauucacucuagugucuuauggcuuuuuauuccuaugugauaguaauaaagucucauguagggauggaagccaugaaauacauugugaaauguca

SEQ ID NO: 2626 - RNA, 100 nt, Monodelphis domestica
agcucucugcuguggccuauggcuuuucauuccuaugugauugcuguucccaacucauguagggcuaaaagccaugggcuacagggaggggagagccucc

SEQ ID NO: 2627 - RNA, 88 nt, Gallus gallus
gccucacuguccuguauggcuuuuuauuccuaugugauuauacaucccgcuucauauagggauugaagccgugcaaggcgcugggguc

SEQ ID NO: 2628 - RNA, 100 nt, Gallus gallus
agauaaauucacucuaguguuuuauggcuuuuuauuccuaugugauaguaauaaagucucauguagggauggaagccaugaaauacauugugaaaaauca

SEQ ID NO: 2629 - RNA, 96 nt, Gallus gallus
cccucugcuguggucuauggcuuuuuauuccuaugugauugcuuuuccuaacucauguagggcgaaaagccaugggcuacucaggggagggacucc

SEQ ID NO: 2630 - RNA, 100 nt, Xenopus tropicalis
agauaaauucacugugguguuuuauggcuuuuuauuccuaugugauaguaauaaugucucauguagggauggaagccaugaaauacauugugaaaaguca

SEQ ID NO: 2631 - RNA, 88 nt, Xenopus tropicalis
cccccugcugagguauauggcuuuuuauuccuaugugauugcuuuccuaauucacauagggcagaaagccaugugcugcacaggggac

SEQ ID NO: 2632 - RNA, 90 nt, Sus scrofa
aggccucgcuguucucuauggcuuuuuauuccuaugugauucuacugcucauucauauagggauuggagccguggcgcacggcggggaca

SEQ ID NO: 2633 - RNA, 100 nt, Sus scrofa; identical to SEQ ID NO: 2614

SEQ ID NO: 2634 - RNA, 98 nt, Danio rerio
acagcugucgugucuuauggcuuuuuauuccuaugugaaggugaacaaggcucauguagggauacaagccacuaaacacgcagucagaaaucagcuuu

SEQ ID NO: 2635 - RNA, 82 nt, Danio rerio
cucuuugccccguauggcuuuuuauuccuaucugagaauugcucaggacucauauagggauggaagccaugcagggcugggg

SEQ ID NO: 2636 - RNA, 80 nt, Danio rerio
ugcuguguuuuauggcuuucuauuccuaugugauuuucuucugccgugucacauaggguucaaagccauuggguacagag

SEQ ID NO: 2637 - RNA, 80 nt, Danio rerio; identical to SEQ ID NO: 2636

SEQ ID NO: 2638 - RNA, 127 nt, Danio rerio
ugcagucuaaagcaacucaaaacacuacugugcuuuauggcuuucuauuccuaugugauuuugauaugauguaucauguaggguucaaagccauuagguacagaguggcuuaucagcaguggaugua

SEQ ID NO: 2639 - RNA, 79 nt, Fugu rubripes
ugcuguguuuuauggcuuucuauuccuaugugauuuucucuagcaugucacauagggucuaaagccauuggguacagag

SEQ ID NO: 2640 - RNA, 83 nt, Fugu rubripes
augcccagugcacuguauggcuuuuuauuccuaucugacuguacugauaguucauauagggauggaagccaugcacugcgcug

SEQ ID NO: 2641 - RNA, 79 nt, Tetraodon nigroviridis; identical to SEQ ID NO: 2639

SEQ ID NO: 2642 - RNA, 83 nt, Tetraodon nigroviridis
gcccagugcgcuguauggcuuuuuauuccuaucugacuguacugagaguucauauagggauggaagccaugcaccgcgcuggg

SEQ ID NO: 2643 - RNA, 62 nt, Mus musculus
gaggacuccauuuguuuugaugauggauucuuaagcuccaucaucgucucaaaugagucuuc

SEQ ID NO: 2644 - RNA, 82 nt, Rattus norvegicus
ugagcccucggaggacuccauuuguuuugaugauggauucuuaagcuccaucaucgucucaaaugagucuucagaggguucu

SEQ ID NO: 2645 - RNA, 92 nt, Macaca mulatta
uuggaugagcccucggaggacuccauuuguuuugaugauggauucuuaugcuccaucaucgucucaaaugagucuucagaggguucuaucau

SEQ ID NO: 2646 - RNA, 82 nt, Gorilla gorilla; identical to SEQ ID NO: 1647

SEQ ID NO: 2647 - RNA, 82 nt, Pan paniscus; identical to SEQ ID NO: 1647

SEQ ID NO: 2648 - RNA, 82 nt, Pan troglodytes; identical to SEQ ID NO: 1647

SEQ ID NO: 2649 - RNA, 82 nt, Pongo pygmaeus; identical to SEQ ID NO: 1647

SEQ ID NO: 2650 - RNA, 56 nt, Canis familiaris
acuccauuuguuuugaugauggauucuuacgcuccaucaucgucucaaaugagucu

SEQ ID NO: 2651 - RNA, 92 nt, Ovis aries
ucggaugagcccucggaggacuccauuuguuuugaugauggauucuuacgcuccaucaucgucucaaaugagucuucagaggguucuaucau

SEQ ID NO: 2652 - RNA, 82 nt, Sus scrofa
ugagcccucggaggacuccauuuguuuugaugauggauucuuacgcuccaucaucgucucaaaugagucuucagaggguucu

SEQ ID NO: 2653 - RNA, 64 nt, Mus musculus
acccauaaaguagaaagcacuacuaacagcacuggaggguguaguguuuccuacuuuauggaug

SEQ ID NO: 2654 - RNA, 87 nt, Rattus norvegicus; identical to SEQ ID NO: 1648

SEQ ID NO: 2655 - RNA, 87 nt, Macaca mulatta; identical to SEQ ID NO: 1648

SEQ ID NO: 2656 - RNA, 86 nt, Xenopus tropicalis
cagugcagccacccauaaaguagaaagcacuacuagacaggacugaacgcuguaguguuuccuacuuuauggaugaguguacuggg

SEQ ID NO: 2657 - RNA, 86 nt, Xenopus tropicalis; identical to SEQ ID NO: 2656

SEQ ID NO: 2658 - RNA, 86 nt, Danio rerio
acagugcagucacucauaaaguagacagcacuacuaaacuucucuacacaguguaguguuuccuacuuuauggaugaguguacugu

SEQ ID NO: 2659 - RNA, 86 nt, Fugu rubripes
acagugcagucauccauaaaguagaaagcacuacuaaacucuuugccacaguguaguguuuccuacuuuauggaugaguguacugu

SEQ ID NO: 2660 - RNA, 86 nt, Fugu rubripes
acagugcugucacccauaaaguagaaagcacuacuaaacuauucuacacaguguaguguuuccuacuuuauggaugagugcacugu

SEQ ID NO: 2661 - RNA, 90 nt, Tetraodon nigroviridis
guacagugcagucauccauaaaguagaaagcacuacuaaacucuucgccacaguguaguguuuccuacuuuauggaugaguguacuguug

SEQ ID NO: 2662 - RNA, 86 nt, Tetraodon nigroviridis
acagugcugucacccauaaaguagaaagcacuacuaaacgucuuuacacaguguaguguuuccuacuuuauggaugagugcacugu

SEQ ID NO: 2663 - RNA, 65 nt, Mus musculus
agcucugagaacugaauuccauggguuauaucaaugucagaccugugaaauucaguucuucagcu

SEQ ID NO: 2664 - RNA, 95 nt, Rattus norvegicus
uguguauccucagcucugagaacugaauuccauggguuauagcaaugucagaccugugaaguucaguucuuuagcugggauagcucuaucgucau

SEQ ID NO: 2665 - RNA, 99 nt, Macaca mulatta
ccuauguguauccucagcuuugagaacugaauuccauggguugugucagugucagaccugugaaauucaguucuucagcugggauaucucugucgucgu

SEQ ID NO: 2666 - RNA, 58 nt, Canis familiaris
ugagaacugaauuccauggguugugucagugucagaccugugaaguucaguucuucag

SEQ ID NO: 2667 - RNA, 99 nt, Gallus gallus
guguauccucagcuuugagaacugaauuccauggguuguaauugaauccuuugucagacccauggggcucaguucuucagcuuggauauuucugucuuc

SEQ ID NO: 2668 - RNA, 114 nt, Danio rerio
gaguuuguuuugagcacuuuucccugagaacugaauuccauagaugguguucaugaaaaguucaucuaugggcucaguucuucuggcaaucuguuuaaugucugcuacaaauuc

SEQ ID NO: 2669 - RNA, 109 nt, Mus musculus
gacugagagaacuuuggccaccuggcucugagaacugaauuccauaggcugugagcucuagcagacgcccuagggacucaguucuggugcccggcugugcuauaccauc

SEQ ID NO: 2670 - RNA, 88 nt, Rattus norvegicus
uggccaccuggcccugagaacugaauuccauaggcugugaacucuagcagaugcccuagggacucaguucuggugccuggcugugcua

SEQ ID NO: 2671 - RNA, 61 nt, Canis familiaris
ugagaacugaauuccauaggcugugagcuugagcaaacagccuagggacucaguucuggug

SEQ ID NO: 2672 - RNA, 105 nt, Gallus gallus
ggacuggcugcuuggcuuugagaacugaauuccauaggcguuaaagcauccaaaaaugcccuauggauucaguucugcaguugggcagcaaauaaaccuccagcc

SEQ ID NO: 2673 - RNA, 100 nt, Xenopus tropicalis
ccaauggcagggcccggcucugagaacugaauuccauggacuguuccacucacagcacccucaguccacaguguucagugcuccagucuggcugccacua

SEQ ID NO: 2674 - RNA, 80 nt, Danio rerio
gcucuuggcuuugagaacugaauuccaagggugucugcuuuauauucagcccacggaguucaguucuuaaguuuggaugc

SEQ ID NO: 2675 - RNA, 80 nt, Danio rerio; identical to SEQ ID NO: 2674

SEQ ID NO: 2676 - RNA, 87 nt, Mus musculus
gguugcuucagugaacauucaacgcugucggugaguuuggaauucaaauaaaaaccaucgaccguugauuguacccuauagcuaacc

SEQ ID NO: 2677 - RNA, 76 nt, Mus musculus
ccauggaacauucaacgcugucggugaguuugggauucaaaaacaaaaaaaccaccgaccguugacuguaccuugg

SEQ ID NO: 2678 - RNA, 89 nt, Mus musculus
gccaaggguuugggggaacauucaaccugucggugaguuugggcagcucagacaaaccaucgaccguugaguggaccccgaggccugga

SEQ ID NO: 2679 - RNA, 72 nt, Mus musculus
acaauuaacauucauuguugucgguggguugugaggaggcagccagacccaccgggggaugaaugucacugu

SEQ ID NO: 2680 - RNA, 100 nt, Rattus norvegicus
agguugcuucagugaacauucaacgcugucggugaguuuggaauucaaauaaaaaccaucgaccguugauuguacccuauagcuaaccauuaucuacucc

SEQ ID NO: 2681 - RNA, 117 nt, Rattus norvegicus
agaugggcaaccaaggcagccuuaagaggacuccauggaacauucaacgcugucggugaguuugggauucaaaaacaaaaaaaaccaccaaccguugacuguaccuugggauucuua

SEQ ID NO: 2682 - RNA, 110 nt, Rattus norvegicus
ccugugcagagaugauguuuacaaaggucacaaucaacauucauugcugucgguggguugaacuguguagaaaagcucacugaacaaugaaugcaacuguggccccgcuu

SEQ ID NO: 2683 - RNA, 88 nt, Rattus norvegicus
ugauggcugcacucaacauucauugcugucgguggguuugaaugucaaccaacucacuggucaaugaaugcaaacugcgggccaaaaa

SEQ ID NO: 2684 - RNA, 106 nt, Rattus norvegicus
agaacuugccaaggguuugggggaacauucaaccugucggugaguuugggcagcucagacaaaccaucgaccguugaguggaccccgaggccuggaacugccaccc

SEQ ID NO: 2685 - RNA, 83 nt, Rattus norvegicus
ggucacaauuaacauucauuguugucgguggguugugaggagaagaccagacccaccgggggaugaaugucacuguggcuggg

SEQ ID NO: 2686 - RNA, 110 nt, Lagothrix lagotricha
ugaguuuugagguugcuucagugaacauucaacgcugucggugaguuuggaauuaaaaucaaaaccaucgaccguugauuguacccuauggcuaaccaucaucuacucca

SEQ ID NO: 2687 - RNA, 110 nt, Lagothrix lagotricha
ccugugcagagauuauuuuuuaaaaggucacaaucaacauucauugcugucgguggguugaacuguguggacaagcucacugaacaaugaaugcaacuguggccccgcuu

SEQ ID NO: 2688 - RNA, 112 nt, Saguinus labiatus
agaagggcuaccaggccaaccuucagaggacuccaaggaacauucaacgcugucggugaguuugggacuugaaaaaaaaccacugaccguugacuguaccuugggguccuua

SEQ ID NO: 2689 - RNA, 110 nt, Macaca mulatta; identical to SEQ ID NO: 2686

SEQ ID NO: 2690 - RNA, 110 nt, Macaca mulatta
agaagggcuaucaggccagccuucagaggacuccaaggaacauucaacgcugucggugaguuugggauuugaaaaaaccacugaccguugacuguaccucgggguccuua

SEQ ID NO: 2691 - RNA, 110 nt, Macaca mulatta
ccugugcagagauuauuuuuuaaaaggucacaaucaacauucauugcugucgguggguugaacuguguagacaagcucacugaacaaugaaugcaacuguggccccgcuu

SEQ ID NO: 2692 - RNA, 89 nt, Macaca mulatta
cugauggcugcacucaacauucauugcugucgguggguuugagucugaaucaacucacugaucgaugaaugcaaacugcggaccaaaca

SEQ ID NO: 2693 - RNA, 110 nt, Macaca mulatta
cggagaauuugccaaggguuugggggaacauucaaccugucggugaguuugggcagcucaggcaaaccaucgaccguugaguggacccugagaccuggacuugccauccu

SEQ ID NO: 2694 - RNA, 137 nt, Macaca mulatta
guccccuccccuaggccacagccaaggucacaaucaacauucauuguugucgguggguugugaggaccgaggccagacccaccgggggaugaaugucacuguggcugggccagacacggcuuaaggggaauggggac

SEQ ID NO: 2695 - RNA, 110 nt, Macaca nemestrina; identical to SEQ ID NO: 2686

SEQ ID NO: 2696 - RNA, 110 nt, Macaca nemestrina
agaagggcuaucaggccagccuucagaggacuccaaggaacauucaacgcugucggugaguuugggauuugaaaaaaccacugaccguugacuguaccucggggucccca

SEQ ID NO: 2697 - RNA, 110 nt, Macaca nemestrina; identical to SEQ ID NO: 2691

SEQ ID NO: 2698 - RNA, 110 nt, Gorilla gorilla
ugaguuuugagguugcuucagugaacauucaacgcugucggugaguuuggaauuaaaaucaaaaccaucgaccguugauuguacccuauggcuaaccaucaucuucucca

SEQ ID NO: 2699 - RNA, 110 nt, Gorilla gorilla
agaagggcuaucaggccaggcuucagaggacuccaaggaacauucaacgcugucggugaguuugggauuugaaaaaaccacugaccguugacuguaccuugggguccuua

SEQ ID NO: 2700 - RNA, 110 nt, Gorilla gorilla; identical to SEQ ID NO: 2687

SEQ ID NO: 2701 - RNA, 110 nt, Gorilla gorilla
cggaaaauuugccaaggguuugggggaacauucaaccugucggugaguuugggcagcucaggcaaaccaucgaccguugaguggacccugaggccuggaauugccauccu

SEQ ID NO: 2702 - RNA, 110 nt, Pan paniscus; identical to SEQ ID NO: 2686

SEQ ID NO: 2703 - RNA, 110 nt, Pan paniscus; identical to SEQ ID NO: 1651

SEQ ID NO: 2704 - RNA, 110 nt, Pan paniscus; identical to SEQ ID NO: 2687

SEQ ID NO: 2705 - RNA, 110 nt, Pan paniscus; identical to SEQ ID NO: 2701

SEQ ID NO: 2706 - RNA, 110 nt, Pan troglodytes; identical to SEQ ID NO: 2686

SEQ ID NO: 2707 - RNA, 110 nt, Pan troglodytes; identical to SEQ ID NO: 1651

SEQ ID NO: 2708 - RNA, 108 nt, Pan troglodytes
ccugugcagagauuauuuuuuaaaaggucacaaucaacauucauugcugucgguggguugaacuguguggacaagcucacugaacaaugaaugcaacuguggccccgc

SEQ ID NO: 2709 - RNA, 110 nt, Pan troglodytes; identical to SEQ ID NO: 2701

SEQ ID NO: 2710 - RNA, 110 nt, Pongo pygmaeus; identical to SEQ ID NO: 2686

SEQ ID NO: 2711 - RNA, 110 nt, Pongo pygmaeus
ccugugcagagauuauuguuuaaaaggucacaaucaacauucauugcugucgguggguugaacuguguggacaagcucacugaacaaugaaugcaacuguggccccgcuu

SEQ ID NO: 2712 - RNA, 62 nt, Canis familiaris
aacauucaacgcugucggugaguuuggaauuaaaaucaaaaccaucgaccguugauuguacc

SEQ ID NO: 2713 - RNA, 60 nt, Canis familiaris
aacauucaacgcugucggugaguuugggauuugaaaaaaccaccgaccguugacuguacc

SEQ ID NO: 2714 - RNA, 62 nt, Canis familiaris
aacauucauugcugucgguggguugaacuguguggacaagcucacugaacaaugaaugcaac

SEQ ID NO: 2715 - RNA, 60 nt, Canis familiaris
aacauucauugcugucgguggguuugagucugaaucaacucacugaucaaugaaugcaaa

SEQ ID NO: 2716 - RNA, 61 nt, Canis familiaris
aacauucaaccugucggugaguuugggcagcucaggcaaaccaucgaccguugaguggacc

SEQ ID NO: 2717 - RNA, 64 nt, Canis familiaris
aacauucauuguugucgguggguugugaggacggaggccagacccaccgagggaugaaugucac

SEQ ID NO: 2718 - RNA, 64 nt, Monodelphis domestica
ugaacauucaacgcugucggugaguuuggaauuaaaaugaaaaccaucgaccguugauuguacc

SEQ ID NO: 2719 - RNA, 87 nt, Monodelphis domestica
aaggucacaaucaacauucauugcugucgguggguuuaacuguauggacaagcucacugaacaaugaaugcaacuguggccccacuu

SEQ ID NO: 2720 - RNA, 72 nt, Monodelphis domestica
ugggggaacauucaacgcugucggugaguuugagcagcugaaggcaaaccaucgaccguugaguggaccccg

SEQ ID NO: 2721 - RNA, 104 nt, Gallus gallus
uguagugguugcuucagugaacauucaacgcugucggugaguuuggaauuuaagugaaaaccaucgaccguugauuguacccuccagcuaaccauccuccuccu

SEQ ID NO: 2722 - RNA, 91 nt, Gallus gallus
gccaucuuuggauagcuucagugaacauucaacgcugucggugaguuugagaacuaagaaaaaccaucgaccguugacuguaccuugaggu

SEQ ID NO: 2723 - RNA, 89 nt, Gallus gallus
aaaaggucacaaucaacauucauugcugucgguggguuuaacuauguggacaagcucacugaacaaugaaugcaacuguggccccacau

SEQ ID NO: 2724 - RNA, 85 nt, Gallus gallus
cuaauggcugcaaucaacauucauugcugucgguggguuuucauugcuaucaacucacugaucaaugaaugcaaacugcggacca

SEQ ID NO: 2725 - RNA, 90 nt, Xenopus tropicalis
ggcuacuuuagugaacauucaacgcugucggugaguuugguaucuaaaggcaaaccaucgaucguugacuguacauuacggcaaugccag

SEQ ID NO: 2726 - RNA, 95 nt, Xenopus tropicalis
uugagggcuucagagaacauucaacgcugucggugaguuugagaaaguguaaaaauauaaaccaucggccguugacuguacccugaggcuuuuca

SEQ ID NO: 2727 - RNA, 83 nt, Xenopus tropicalis
aaggucacaaucaacauucauugcugucgguggguugaguuaagaacacaagcucgcugaacgaugaaugcaacugugucccc

SEQ ID NO: 2728 - RNA, 83 nt, Xenopus tropicalis
aauggcugcaauaaacauucauugcugucgguggguuguaguuuagaaaagcucauugaucaaugaaugcaaacugcagacca

SEQ ID NO: 2729 - RNA, 110 nt, Bos taurus
ugccagggccaggacccagucuucagaggacuccaaggaacauucaacgcugucggugaguuugggauuugaaaaaaccaccgaccguugacuguaccuuggguuccuua

SEQ ID NO: 2730 - RNA, 89 nt, Bos taurus
cugauggcugcacucaacauucauugcugucgguggguuugacuuugaaucaacucacugaucaaugaauguaaacugcggaccaaaca

SEQ ID NO: 2731 - RNA, 97 nt, Bos taurus
uugccaaggguuugggggaacauucaaccugucggugaguuugggcagcucaggcaaaccaucgaccguugaguggaccccgaggccuggaacugcc

SEQ ID NO: 2732 - RNA, 86 nt, Sus scrofa
auggcugcacucaacauucauugcugucgguggguuugagucugaaucaacucacugaucaaugaaugcaaacugcggaccaaaca

SEQ ID NO: 2733 - RNA, 87 nt, Sus scrofa
caaggguuugggggaacauucaaccugucggugaguuugggcagcucaggcaaaccaucgaccguugaguggaccccgaggccugga

SEQ ID NO: 2734 - RNA, 84 nt, Danio rerio
guuugccucagugaacauucaacgcugucggugaguuugagcuaaauggaaaaaaaccaucgaccguugauuguacccugcggc

SEQ ID NO: 2735 - RNA, 79 nt, Danio rerio
uuggugaacauucaacgcugucggugaguuuugcgcuucuguaacaaaccaucgaccguugacuguacccugagggugg

SEQ ID NO: 2736 - RNA, 109 nt, Danio rerio
cauguacgcaccuucaguucuucaaaggucauaaucaacauucauugcugucgguggguuuagucuuguaacagcucucugaacaaugaauguaacuguggcccagauu

SEQ ID NO: 2737 - RNA, 86 nt, Danio rerio
cuaaugacugcaauaaacauucauugcugucgguggguuucuaauagacacaacucacugaucaaugaaugcaaacugcggugcaa

SEQ ID NO: 2738 - RNA, 78 nt, Danio rerio
ggguccugauucacauucauugcugucgguggguuuuaucucuucgacucgccggacaaugaaugagaacuacggcuc

SEQ ID NO: 2739 - RNA, 83 nt, Fugu rubripes
gcucgccccggugaacauucaacgcugucggugaguuugagcuaaauuggaaaaaccaucgaccguugauuguaccccguggc

SEQ ID NO: 2740 - RNA, 97 nt, Fugu rubripes
gacuuugucaagucuuuggggaacauucaacgcugucggugaguuuugucuccgaaaaaccaucgacuguugaguguacccugacacuugagcuccc

SEQ ID NO: 2741 - RNA, 87 nt, Fugu rubripes
aaaggucacaaucaacauucauugcugucgguggguuuaacuguauggaagagcucacugaacgaugaaugcaacugugucccagau

SEQ ID NO: 2742 - RNA, 75 nt, Fugu rubripes
gcucgcaauaaacauucauugcugucgguggguuucuauggcaauagcucacugaccaaugaaugaagacugcgg

SEQ ID NO: 2743 - RNA, 83 nt, Tetraodon nigroviridis
gcucgccccggugaacauucaacgcugucggugaguuugagccaaauuggaaaaaccaucgaccguugauuguaccccguggc

SEQ ID NO: 2744 - RNA, 91 nt, Tetraodon nigroviridis
caguuuuuucaggucuuuggggaacauucaacgcugucggugaguuuggugacucagaaaaaaaccaucgagcguugaguguaccuuuagg

SEQ ID NO: 2745 - RNA, 87 nt, Tetraodon nigroviridis; identical to SEQ ID NO: 2741

SEQ ID NO: 2746 - RNA, 75 nt, Tetraodon nigroviridis
gcucgcaauaaacauucauugcugucgguggguuuccauggcaauagcucgcugaccaaugaaugaagacugcgg

SEQ ID NO: 2747 - RNA, 105 nt, Xenopus tropicalis
aguggcuucucuggcaguguuuggcaaugguagaacucacacuggugagcuaugaagauccggugguucuagacuugccaacuauggccugggaauaaagcagca

SEQ ID NO: 2748 - RNA, 68 nt, Danio rerio
guauuuggcaaugguagaacucacacuggugagguagucagauccggugguucuagacuugccaacua

SEQ ID NO: 2749 - RNA, 70 nt, Mus musculus
cuguguauggcacugguagaauucacugugaacagucucagucagugaauuaccgaagggccauaaacag

SEQ ID NO: 2750 - RNA, 110 nt, Rattus norvegicus
ccagagagugugacuccuguccuguguauggcacugguagaauucacugugaacagucucggucagugaauuaccgaagggccauaaacagagcagagacagauccgcga

SEQ ID NO: 2751 - RNA, 110 nt, Saguinus labiatus
ccgcagaacgugacuccuguucuguguauggcacugguagaauucacugugaacagucucggucagugaauuaccgaagggccauaaacagagcagagacagauccucga

SEQ ID NO: 2752 - RNA, 110 nt, Macaca mulatta
ccgcagaacgugacuccuguucuguguauggcacugguagaauucacugugaacagucucggucagugaauuaccgaagggccauaaacagagcagagacagauccacga

SEQ ID NO: 2753 - RNA, 110 nt, Macaca nemestrina; identical to SEQ ID NO: 2752

SEQ ID NO: 2754 - RNA, 110 nt, Gorilla gorilla; identical to SEQ ID NO: 1653

SEQ ID NO: 2755 - RNA, 110 nt, Pan paniscus; identical to SEQ ID NO: 1653

SEQ ID NO: 2756 - RNA, 110 nt, Pan troglodytes; identical to SEQ ID NO: 1653

SEQ ID NO: 2757 - RNA, 62 nt, Canis familiaris
uauggcacugguagaauucacugugaacagucucggucagugaauuaccgaagggccauaaa

SEQ ID NO: 2758 - RNA, 88 nt, Monodelphis domestica
acuccuguucuguguauggcacugguagaauucacugugaaaacacacuaucagugaauuaccaaagggccauaaacagagcagagaa

SEQ ID NO: 2759 - RNA, 98 nt, Gallus gallus
acuccuguucuguguauggcacugguagaauucacugugcaaccccgcggucagugaauuaccauagggccauaaacaaagcagagaaagacccgcga

SEQ ID NO: 2760 - RNA, 97 nt, Xenopus tropicalis
caucccuccuguucuguguauggcacugguagaauucacugugaaaacacaaaaucagugaauuaccauagggccauaaacagagcagagaaagaac

SEQ ID NO: 2761 - RNA, 70 nt, Sus scrofa
cuguguauggcacugguagaauucacugugaacagucucggucagugaauuaccgaagggccauaaacag

SEQ ID NO: 2762 - RNA, 98 nt, Danio rerio
gacuccuguucuguguauggcacugguagaauucacugugaaagcacacuaucagugaauuaccaaagggccauaaacagagcagagaaagaaccacg

SEQ ID NO: 2763 - RNA, 70 nt, Fugu rubripes
cuguguauggcacugguagaauucacugugagagcucacuaucagugaauuaccauagggccauaaacag

SEQ ID NO: 2764 - RNA, 70 nt, Tetraodon nigroviridis; identical to SEQ ID NO: 2763

SEQ ID NO: 2765 - RNA, 61 nt, Mus musculus
ucaggcuacaacacaggacccgggcgcugcucugaccccucgugucuuguguugcagccgg

SEQ ID NO: 2766 - RNA, 104 nt, Rattus norvegicus
gggcucacaggacacaaugcggauccucaggcuacaacacaggacccgggcgcugcucugaccccucgugucuuguguugcagccggagggacgcaggucugca

SEQ ID NO: 2767 - RNA, 109 nt, Macaca mulatta
ggucaggcucacuaugacacagugugagaccucgggcuacaacacaggacccgggugcugcucugaccccucgugucuuguguugcagccggagggacgcagguccgca

SEQ ID NO: 2768 - RNA, 109 nt, Macaca nemestrina; identical to SEQ ID NO: 2767

SEQ ID NO: 2769 - RNA, 109 nt, Gorilla gorilla; identical to SEQ ID NO: 1654

SEQ ID NO: 2770 - RNA, 109 nt, Pan paniscus; identical to SEQ ID NO: 1654

SEQ ID NO: 2771 - RNA, 109 nt, Pongo pygmaeus
gguugggcucaccaugacacagugugagaccucgggcuacaacauaggacccgggcgcugcucugaccccucgugucuuguguugcagccggagggacgcagguccgca

SEQ ID NO: 2772 - RNA, 81 nt, Monodelphis domestica
auugugagaccucuggcuacaacacaggacacgggagcuuuucugaacccucgugucuuguguugcagccagaggggcaca

SEQ ID NO: 2773 - RNA, 86 nt, Gallus gallus
aaacuauugugagaccuccggcuacaacacaggacaugggagcuuuucugaacccucgugucuuguguugcagccagaggggcaca

SEQ ID NO: 2774 - RNA, 82 nt, Xenopus tropicalis
ugguauaccuuugguuacaacacaggacaugggagcuuacuuggaacccucgugucuuguguugcagccagugguggccaaa

SEQ ID NO: 2775 - RNA, 89 nt, Danio rerio
ugaccuguggcugggccaggggcugcaacacaggacaugggagcugucucucacucccgcucgugucuuguguugcagccaguggaacg

SEQ ID NO: 2776 - RNA, 92 nt, Fugu rubripes
guggccauuuggccgggccaggggcugcaacacaggacaugggucaugccucugcccaccgcucgugucuuguguugcagccaguggagcug

SEQ ID NO: 2777 - RNA, 65 nt, Tetraodon nigroviridis
ggcugcaacacaggacaugggucuugccucugcccgccgcucgugucuuguguugcagccagugg

SEQ ID NO: 2778 - RNA, 89 nt, Mus musculus
cgugcacagggcucugaccuaugaauugacagccaguacucuuuucucuccucuggcugccaauuccauaggucacagguauguucacc

SEQ ID NO: 2779 - RNA, 110 nt, Rattus norvegicus
gucaagauggagugcacagggcucugaccuaugaauugacagccaguacucugaucucgccucuggcugccaguuccauaggucacagguauguucgccucaaugccagc

SEQ ID NO: 2780 - RNA, 110 nt, Macaca mulatta
gcugagaccgagugcacagggcucugaccuaugaauugacagccagugcucucgucuccccucuggcugccaauuccauaggucacagguauguucgccucaaugccagc

SEQ ID NO: 2781 - RNA, 65 nt, Canis familiaris
cugaccuaugaauugacagccagugcucucaucucuccucuggcugccaauuccauaggucacag

SEQ ID NO: 2782 - RNA, 87 nt, Xenopus tropicalis
gaguguacgggccuaugaccuaugaauugacagccaguggaugugaagucugccugucaauucuguaggccacagguucguccaccu

SEQ ID NO: 2783 - RNA, 106 nt, Bos taurus
agaccgagugcacagggcucugaccuaugaauugacagccagugcucuuguguccccucuggcugccaauuccauaggucacagguauguucgccucaaugccagc

SEQ ID NO: 2784 - RNA, 85 nt, Danio rerio
cuaggacacagggugaugaccuaugaauugacagccaguguuugcaguccagcugccugucaguucuguaggccacugcccuguu

SEQ ID NO: 2785 - RNA, 82 nt, Fugu rubripes
ugggacgugaggugaugaccuaugaauugacagccaguaacuggagccucugccugucaguucuguaggccacugcuacguu

SEQ ID NO: 2786 - RNA, 83 nt, Tetraodon nigroviridis
cacgaggugaugaccuaugaauugacagccaguaacuggagccucugccugucaguucuguaggccacugcugcguccguccc

SEQ ID NO: 2787 - RNA, 112 nt, Mus musculus
agcucucagcaucaacgguguacaggagaaugaccuaugauuugacagaccgugcagcuguguaugucugucauucuguaggccaauauucuguaugucacugcuacuuaaa

SEQ ID NO: 2788 - RNA, 97 nt, Rattus norvegicus
gguguacaggacaaugaccuaugauuugacagacaguguggcugcgugugucugucauucuguaggccaauauucuguaugucucuccuccuuacaa

SEQ ID NO: 2789 - RNA, 110 nt, Macaca mulatta
aucauuaagaaaugguauacaggaaaaugaccuaugaauugacagacacuauagcugaguuugucugucauuucuuuaggccaauauucuguaugacugugcuacuucaa

SEQ ID NO: 2790 - RNA, 110 nt, Macaca nemestrina; identical to SEQ ID NO: 2789

SEQ ID NO: 2791 - RNA, 110 nt, Gorilla gorilla
aucauucagaaaugguauacgggaaaaugaccuaugaauugacagacaauauagcugaguuugucugucauuucuuuagaccaauauucuguaugacugugcuacuucaa

SEQ ID NO: 2792 - RNA, 110 nt, Pan troglodytes
aucauucagaaaugguauacgggaaaaugaccuaugaauugacagacaauauagcugaguuugucugucauuucuuuaggccaauauucuguaugacugugcuacuucaa

SEQ ID NO: 2793 - RNA, 110 nt, Pongo pygmaeus
aucauucagaaaugguauacaggaaaaugaccuaugaauugacagacaauacagcugaguuugucugucauuucuuuaggccaauauucuguacaacugugcuacuucaa

SEQ ID NO: 2794 - RNA, 105 nt, Gallus gallus
ucaguaagaacugguguccaggaaaaugaccuaugaauugacagacugcuuucaaaaugugccugucauuucuauaggccaauauucugugcacuuuuccuacuu

SEQ ID NO: 2795 - RNA, 97 nt, Xenopus tropicalis
aacugguaaccaggaggaugaccuaugaaaugacagccacuuccauaccaaacaugucugucauuucuguaggccaauauucugauugcuuuguuga

SEQ ID NO: 2796 - RNA, 79 nt, Bos taurus
uguacaggaaaaugaccuaugaauugacagacaacgugacuaagucugucugucauuucuguaggccaauguucuguau

SEQ ID NO: 2797 - RNA, 90 nt, Mus musculus
cugggccucugugggcaucuuaccggacagugcuggauuucuuggcuugacucuaacacugucugguaacgauguucaaaggugacccac

SEQ ID NO: 2798 - RNA, 86 nt, Monodelphis domestica
gggccucugugggcaucuuacuagacagugcuggauuuuuggauguacucuaacacugucugguaacgauguuuaaagagggaacc

SEQ ID NO: 2799 - RNA, 106 nt, Rattus norvegicus
guuagcuaugaguuaguuuaaucucagcuggcaacugugagaugucccuaucauuccucacaguggucucugggauuaugcuaaacagagcaauuuccuugaccuc

SEQ ID NO: 2800 - RNA, 110 nt, Macaca mulatta
gauggcugugaguuggcuuaaucucagcuggcaacugugagauguucauacaaucccucacaguggucucugggauuacgcuaaacagagcaauuuccuugcccucgcga

SEQ ID NO: 2801 - RNA, 110 nt, Gorilla gorilla; identical to SEQ ID NO: 1658

SEQ ID NO: 2802 - RNA, 110 nt, Pan paniscus; identical to SEQ ID NO: 1658

SEQ ID NO: 2803 - RNA, 110 nt, Pongo pygmaeus
gauggcugugaguuggcuuaaucucagcuggcaacugugagauguucauacaaucccucacaguggucucugggauuaugcuaaacagagcaauuuccuugcccucacga

SEQ ID NO: 2804 - RNA, 110 nt, Lemur catta; identical to SEQ ID NO: 1658

SEQ ID NO: 2805 - RNA, 97 nt, Monodelphis domestica
gauggcugugaauuggcuuaaucucagcuggcaacugugagauguuaauaaauucccucacaguggucucugggauuaugcuaaacagagcaauuuc

SEQ ID NO: 2806 - RNA, 106 nt, Gallus gallus
gauggcugugaauuggcuuaaucucagcuggcaacugugagcaguuaauaauucucacagugguaucugggauuaugcuaaacacagcaauuucuuugcucuaaug

SEQ ID NO: 2807 - RNA, 91 nt, Xenopus tropicalis
uggcugugaauuggcuuaaucucagcuggcaacugugagcaguuaauaaauuaucucacaguggucucugggauuauacuaaacacagcaa

SEQ ID NO: 2808 - RNA, 105 nt, Sus scrofa
gauggcugugaguuggcuuaaucucagcuggcaacugugagauguucauacaaucccccacaguggucucugggauuaugcuaaacagagcaauuuccuugcccu

SEQ ID NO: 2809 - RNA, 89 nt, Danio rerio
gcugauuuuuggcauaaucucagcuggcaacugugaguaguguuuucaucccucucacaggcgcugcugggguucugucacacacagca

SEQ ID NO: 2810 - RNA, 89 nt, Danio rerio; identical to SEQ ID NO: 2809

SEQ ID NO: 2811 - RNA, 73 nt, Fugu rubripes
uugguaaaaucucagcuggcaacugugagucguucacuagcugcucucacaauggccucugggauuaugcuaa

SEQ ID NO: 2812 - RNA, 73 nt, Tetraodon nigroviridis
uuggugaaaucucagcuggcaacugugagucguucacuagcugcucucacaauggccucugggauuaugcuaa

SEQ ID NO: 2813 - RNA, 108 nt, Mus musculus
aaacauagucauuacaguuuuugauguugcagauacugcaucaggaacugacuggauaagacuuaauccccaucaguuccuaaugcauugccuucagcaucuaaacaa

SEQ ID NO: 2814 - RNA, 105 nt, Rattus norvegicus
accacagucauuguaguuuugaugucgcagauacugcaucaggaacugacuggauaagacucagucaccaucaguuccuaaugcauugccuucagcaucuaaaca

SEQ ID NO: 2815 - RNA, 110 nt, Gorilla gorilla; identical to SEQ ID NO: 1659

SEQ ID NO: 2816 - RNA, 110 nt, Pan paniscus; identical to SEQ ID NO: 1659

SEQ ID NO: 2817 - RNA, 82 nt, Monodelphis domestica
uugaugucguagauacugcaucaggaacugauuggauaauauucaggcaccaucaguuccuaaugcauugccuucagcaucu

SEQ ID NO: 2818 - RNA, 107 nt, Gallus gallus
aaagucacugcagaguucuugaugucgcagauacugcaucaggaacugauuggauaauaaucagucaccaucaguuccuaaugcauugccuucagcaucuaaacaag

SEQ ID NO: 2819 - RNA, 83 nt, Xenopus tropicalis
uugauguuguagauacugcaucaggaacugauuggaucccagggagcagccaucaguuccuaaugcacugccuucggcaucua

SEQ ID NO: 2820 - RNA, 107 nt, Sus scrofa
auaauuauuacagaguuuuugaugucgcagauacugcaucaggaacugauuggauaagaauuggucaccaucaguucuuaaugcauugccuucagcaucuaaacaag

SEQ ID NO: 2821 - RNA, 98 nt, Danio rerio
augagaacuuucugauguuggugauacugcaucaggaacugauuggaugauauucaggagccaucaguuccugaugcacucccaucagcaucgaaaga

SEQ ID NO: 2822 - RNA, 98 nt, Danio rerio; identical to SEQ ID NO: 2821

SEQ ID NO: 2823 - RNA, 100 nt, Fugu rubripes
augaagagccuucuugaugcggaugauacugcaucaggaacugauuggcugaugcuuuuuacccaacaguaccugaugcauugccuucagcauugaaaga

SEQ ID NO: 2824 - RNA, 89 nt, Tetraodon nigroviridis
ucuugauguggaugauacugcaucaggaacugauuggcugaugcuuaguacccaacaguaccugaugcauugccuucagcauugaaaga

SEQ ID NO: 2825 - RNA, 110 nt, Gorilla gorilla
gacagcguggcauuguagggcuccacaccgugucugacacuuugggcgagggcaccaugcugaagguguucaugaugugaucugggaacuccucacggaucuuacugaug

SEQ ID NO: 2826 - RNA, 110 nt, Pan paniscus
gacagcauggcauuguagggcuccacaccguaucugacacuuugggcgagggcaccaugcugaagguguucaugaugcagucugggaacuccucacggaucuuacugaug

SEQ ID NO: 2827 - RNA, 110 nt, Pan troglodytes; identical to SEQ ID NO: 2826

SEQ ID NO: 2828 - RNA, 79 nt, Mus musculus
cccucaguggcucaguagccaguguagauccugucuuugguaaucagcagcuacaucuggcuacugggucucugguggc

SEQ ID NO: 2829 - RNA, 103 nt, Rattus norvegicus
aaggauuagggugcccucaguggcucaguagccaguguagauccugucuuugguaaucagcagcuacaucuggcuacugggucucugauggcaucaucuagcu

SEQ ID NO: 2830 - RNA, 110 nt, Ateles geoffroyi
ucugccggaagguguggguacccucaguggcucaguagccaguguagauccugucuuuuguaaucaguagcuacaucuggcuacugggucucugauggcaucuuuuagcu

SEQ ID NO: 2831 - RNA, 110 nt, Macaca mulatta
gcugcuggaagguauagguacccucaauggcucaguagccaguguagauccugucuuucguaaucagcagcuacaucuggcuacugggucucugauggcaucuucuagcu

SEQ ID NO: 2832 - RNA, 98 nt, Gallus gallus
uguaguugcccaucaaucgcucaguagucaguguagauucugucuuuacaaucagcagcuacaucuggcuacugggucucugaugacaucucauaucu

SEQ ID NO: 2833 - RNA, 64 nt, Xenopus tropicalis
cgcucaguaaucaguguagauccuguauaucugucagcagcuacaucuggcuacugggucucua

SEQ ID NO: 2834 - RNA, 110 nt, Bos taurus
gcugcuggaauguguagguacccucaauggcucaguagccaguguagauccugucuuuuguaaucaguagcuacaucuggcuacugggucucugauggcaucuucuaccu

SEQ ID NO: 2835 - RNA, 108 nt, Danio rerio
gccgguggcuuguucgggugcucaugagaugcucaguagucaguguagauccugugucacaaucagcagcuacaucuggcuacugggucucugauggcauuuucugcu

SEQ ID NO: 2836 - RNA, 69 nt, Fugu rubripes
ucaguugcucaguaggcaguguagauccuguguagcaaucagcagcuacaucuggcuacugggucucug

SEQ ID NO: 2837 - RNA, 68 nt, Tetraodon nigroviridis
caguugcucaguaggcaguguagauccuguguagcaaucagcagcuacaucuggcuacugggucucug

SEQ ID NO: 2838 - RNA, 110 nt, Mus musculus
ucuggccaucugcagugucacgcuccguguauuugacaagcugaguuggacacucugugugguagagugucaguuugucaaauaccccaaguguggcucaugccuaucag

SEQ ID NO: 2839 - RNA, 110 nt, Rattus norvegicus
ucuggccuucugcaguguuacgcuccguguauuugacaagcugaguuggacacucugugugguagagugucaguuugucaaauaccccaaguguggcucaugcuuaucag

SEQ ID NO: 2840 - RNA, 110 nt, Saguinus labiatus
ccuggccuccugcagugccacgcuccguguauuugacaagcugaguuggacacuccgugugguagagugucaguuugucaaauaccccaagugcgacacaugcuuagcag

SEQ ID NO: 2841 - RNA, 110 nt, Macaca mulatta
cccggccuccugcagugccacgcuccguguauuugacaagcugaguuggacacuccgugugguagagugucaguuugucaaauaccccaagugcggcauaugcuuaccag

SEQ ID NO: 2842 - RNA, 110 nt, Gorilla gorilla; identical to SEQ ID NO: 1662

SEQ ID NO: 2843 - RNA, 110 nt, Pan paniscus; identical to SEQ ID NO: 1662

SEQ ID NO: 2844 - RNA, 110 nt, Pan troglodytes; identical to SEQ ID NO: 1662

SEQ ID NO: 2845 - RNA, 110 nt, Pongo pygmaeus
ccuggccuccugcagugccacgcuccguguauuugacaagcugaguuagacacuccgugugguagagugucaguuugucaaauaccccaagugcggcacaugcuuaccag

SEQ ID NO: 2846 - RNA, 111 nt, Monodelphis domestica
ucuggcccagauccuucagugccacacuccguguauuugacaagcugaguuggacacuccgugucguagagugucaguuugucaaauaccccaagugaggcauuugccuag

SEQ ID NO: 2847 - RNA, 100 nt, Gallus gallus
cugcagugcagcacugcguguauuugacaagcugaguuugacacucagucuggcagagugucaguuugucaaauaccccaagugaggcacuugcugagca

SEQ ID NO: 2848 - RNA, 86 nt, Xenopus tropicalis
aguguggcacugaguguauuugacaagcugaguccgacacucaaugagacagagugucaguuugucaaauaccccaagugaggcac

SEQ ID NO: 2849 - RNA, 99 nt, Danio rerio
cucuccuccugaucuagacucuucucuuagaguauuugacagacugugguugacacucgaucuaaaggggugucaguuugucaaauaccccaagagagg

SEQ ID NO: 2850 - RNA, 89 nt, Fugu rubripes
cacuuaguguauuugacaagcuguucuugacacucuuuauacgcgagugucaguuugucaaauaccccaagugaggugucacuugucug

SEQ ID NO: 2851 - RNA, 85 nt, Tetraodon nigroviridis
caggcccuucacuuaguguauuugacaagcuguguuugacacucuguaucugcgagugucaguuugucaaauaccccaagugagg

SEQ ID NO: 2852 - RNA, 82 nt, Mus musculus
gggcuuuuaagucacuagugguuccguuuaguagaugguuugugcauuguuucaaaauggugcccuagugacuacaaagccc

SEQ ID NO: 2853 - RNA, 82 nt, Rattus norvegicus
gggcuuucaagucacuagugguuccguuuaguagaugguuuuugcauuguuucaaaauggugcccuagugacuacaaagccc

SEQ ID NO: 2854 - RNA, 81 nt, Macaca mulatta; identical to SEQ ID NO: 1663

SEQ ID NO: 2855 - RNA, 81 nt, Macaca nemestrina; identical to SEQ ID NO: 1663

SEQ ID NO: 2856 - RNA, 81 nt, Gorilla gorilla; identical to SEQ ID NO: 1663

SEQ ID NO: 2857 - RNA, 81 nt, Pan paniscus; identical to SEQ ID NO: 1663

SEQ ID NO: 2858 - RNA, 81 nt, Pan troglodytes; identical to SEQ ID NO: 1663

SEQ ID NO: 2859 - RNA, 81 nt, Pongo pygmaeus; identical to SEQ ID NO: 1663

SEQ ID NO: 2860 - RNA, 69 nt, Canis familiaris
caagucacuagugguuccguuuaguagaugauuaugcauuguuucaaaauggugcccuagugacugcaa

SEQ ID NO: 2861 - RNA, 81 nt, Sus scrofa
gggcuuucaagucacuagugguuccguuuaguagaagguuuugcauuguuucaaaauggugcccuagugacuacaaagccc

SEQ ID NO: 2862 - RNA, 74 nt, Mus musculus
guucccuucaacuuuaacaugggaaugcuuucugucucaucgaagaguaagugcuuccauguuuuaguagaagu

SEQ ID NO: 2863 - RNA, 72 nt, Gallus gallus
cccuuuuacuuuaacauggaggugcuuucugugauuuuacaaaaguaagugcuuccauguuuuaguagaggu

SEQ ID NO: 2864 - RNA, 65 nt, Gallus gallus
ccuccgcuuuaacauggagguaccugcugccuacaaaaguaagugcuuccauguuucaguggugg

SEQ ID NO: 2865 - RNA, 95 nt, Mus musculus
gaagaaauccuacucggguggauauaauacaaccugcuaaguguucuagcacuuagcagguuguauuaucauuguccgagguuauggcucucguc

SEQ ID NO: 2866 - RNA, 68 nt, Rattus norvegicus
cucggauggauauaauacaaccugcuaaguguucuagcacuuagcacguuguauuauuauuguccgag

SEQ ID NO: 2867 - RNA, 72 nt, Macaca mulatta
uacaucggccauuauaauacaaccugauaaguguuacagcacuuaucagauuguauuguaauugucugugua

SEQ ID NO: 2868 - RNA, 72 nt, Macaca mulatta
acucggauggauauaauacaaccugcuaaguguccuagcacuuagcagguuguauuaucauuguccgugucu

SEQ ID NO: 2869 - RNA, 52 nt, Canis familiaris
auauaauacaaccugcuaaguguccuagcacuuaucagguuguauuaucauu

SEQ ID NO: 2870 - RNA, 72 nt, Bos taurus
uacaucggccauuauaauacaaccugauaaguguuacagcacuuaucagguuguauuguaauugucugugua

SEQ ID NO: 2871 - RNA, 86 nt, Rattus norvegicus
uuugguauuuaaaagguggauauuccuucuaugguuacgugcuuccuggauaaucauagaggaacauccacuuuuucaguaucaaa

SEQ ID NO: 2872 - RNA, 68 nt, Macaca mulatta; identical to SEQ ID NO: 1670

SEQ ID NO: 2873 - RNA, 80 nt, Macaca mulatta; identical to SEQ ID NO: 1671

SEQ ID NO: 2874 - RNA, 100 nt, Macaca mulatta
caguccuucuuugguauuuaaaacguggauauuccuucuauguuuacgugauuccugguuaaucauagaggaaaauccauguuuucaguaucaaaugcug

SEQ ID NO: 2875 - RNA, 58 nt, Canis familiaris
guagauucuccuucuaugaguacauuauuuaugauuaaucauagaggaaaauccacgu

SEQ ID NO: 2876 - RNA, 58 nt, Canis familiaris
guagauuuuccuucuaugauuacguguuugaugguuaaucauagaggaaaauccacgu

SEQ ID NO: 2877 - RNA, 59 nt, Canis familiaris
gguggauguuccuucuauguuuacgggauuuauaguuaaucauagaggaaaauccacgu

SEQ ID NO: 2878 - RNA, 79 nt, Mus musculus
ugguacucggagagagguuacccgagcaacuuugcaucuggaggacgaauguugcucggugaaccccuuuucgguauca

SEQ ID NO: 2879 - RNA, 77 nt, Rattus norvegicus
gguacucggagagagguuacccgagcaacuuugcaucuggaggacgaauguugcucggugaaccccuuuucgguauc

SEQ ID NO: 2880 - RNA, 79 nt, Macaca mulatta; identical to SEQ ID NO: 1673

SEQ ID NO: 2881 - RNA, 83 nt, Mus musculus
ccugcugauggaugucuuaccagacaugguuagaucuggaugcaucugucuaauacugucugguaaugccguccauccacggc

SEQ ID NO: 2882 - RNA, 85 nt, Rattus norvegicus
ugccugcugauggaugucuuaccagacaugguuagaucuggauguaucugucuaauacugucugguaaugccguccauccauggc

SEQ ID NO: 2883 - RNA, 83 nt, Macaca mulatta
cgccggccgaugagcgucuuaccagacacgguuagaccuggcucucugucuaauacugucugguaaaaccguccauccgcggc

SEQ ID NO: 2884 - RNA, 85 nt, Canis familiaris
agccugcugaugggcgucuuaccagacacgguuagaucuggguucuggugucuaauacugucugguaaugccguucauccauggc

SEQ ID NO: 2885 - RNA, 84 nt, Gallus gallus
gccugcugauugcugucuuaccaggcaaaguuagaucuagcuauuucugucuaauacugucugguaaugccgucaaucgcaugg

SEQ ID NO: 2886 - RNA, 68 nt, Xenopus laevis
uggaugucuuaccagacaugguuagaucuggaugcaucugucuaauacugucugguaaugccguccau

SEQ ID NO: 2887 - RNA, 87 nt, Xenopus tropicalis
ugccuguugaccaaugucuuaccagacaagguuagaucuaguuacucucgucuaauacugucugguaaugccguuggucacauuggc

SEQ ID NO: 2888 - RNA, 82 nt, Danio rerio
cuuguugauggacgucuuaccagacaugguuagauguaauaacuugugucuaauacugucugguaaugccguccaucacaug

SEQ ID NO: 2889 - RNA, 76 nt, Fugu rubripes
ccuguugauaggcgucuuaccagacaugguuagauguaauuauuguugucuaauacugucugguaaugccguccau

SEQ ID NO: 2890 - RNA, 87 nt, Tetraodon nigroviridis
agccuguugauaggcgucuuaccagacaugguuagauguaauuauuguugucuaauacugucugguaaugccguccauuaaauggca

SEQ ID NO: 2891 - RNA, 69 nt, Mus musculus
cccucgucuuacccagcaguguuugggugcugguugggagucucuaauacugccggguaaugauggagg

SEQ ID NO: 2892 - RNA, 95 nt, Rattus norvegicus
ccaacuugggcagccguggccaucuuacugggcagcauuggauagugucugaucucuaauacugccugguaaugaugacggcggagcccugcacg

SEQ ID NO: 2893 - RNA, 69 nt, Rattus norvegicus; identical to SEQ ID NO: 2891

SEQ ID NO: 2894 - RNA, 63 nt, Canis familiaris
cgucuuacccagcaguguuugggugcugguugggagucucuaauacugccggguaaugaugga

SEQ ID NO: 2895 - RNA, 68 nt, Monodelphis domestica
ccaucuuacugggcagcauuggauggugucuguguuucuaauacugccugguaaugaugaugaugggg

SEQ ID NO: 2896 - RNA, 68 nt, Monodelphis domestica
ccccaucuuacccagcaguguuugggugccgcucgggagucucuaauacugccggguaaugauggagg

SEQ ID NO: 2897 - RNA, 85 nt, Gallus gallus
gccauuaccaucuuacugggcagcauuggauguucucuguuuuucuaauacugccugguaaugaugauugugguguuucgugcac

SEQ ID NO: 2898 - RNA, 89 nt, Xenopus tropicalis
cuguggcgcuauugccaucuuacugggcagcauuggauuuugucuauguuucuaauacugccugguaaugaugauuauggcgccccaca

SEQ ID NO: 2899 - RNA, 59 nt, Bos taurus
ccaucuuacugggcagcauuggauggugucuggucucuaauacugccugguaaugauga

SEQ ID NO: 2900 - RNA, 65 nt, Bos taurus
cgucuuacccagcaguguuugggugcugguugggagucucuaauacugccggguaaugauggagg

SEQ ID NO: 2901 - RNA, 82 nt, Danio rerio
gguagucgucuccaucuuacgaggcagcauuggauuucauuacuuuuucuaauacugccugguaaugaugaugauugcugcc

SEQ ID NO: 2902 - RNA, 85 nt, Danio rerio
uggaugccuggcuccaucuuacaaggcaguuuuggauguuauaucuucucuaauacugccugguaaugaugcagauggucaucua

SEQ ID NO: 2903 - RNA, 77 nt, Fugu rubripes
ggugauuaucuccaucuuacgaggcagcauuggauaucaucacuuucucuaauacugccugguaaugaugaugaucg

SEQ ID NO: 2904 - RNA, 77 nt, Tetraodon nigroviridis
ccaucuuacgaggcagcauuggauagcaucacuuuuucuaauacugccugguaaugaugaugaucgucgucugcagg

SEQ ID NO: 2905 - RNA, 112 nt, Mus musculus
acgaggagguugaacauccugcauagugcugccaggaaaucccuacuucauacuaagagggggcuggcugguugcauauguaggaugucccaucuccuggcccacuucguca

SEQ ID NO: 2906 - RNA, 112 nt, Rattus norvegicus
acggggagguugaacauccugcauagugcugccaggaaaucccuacuucauacuaagagggggcuggcugguugcauauguaggaugucccaucucccggcccacuucguca

SEQ ID NO: 2907 - RNA, 111 nt, Macaca mulatta
gccgggagguugaacauccugcauagugcugccaggaaaucccuauuucauacuaagaggggcuggcugguugcauauguaggaugucccaucucccagccuacuucguca

SEQ ID NO: 2908 - RNA, 110 nt, Canis familiaris
gcagggagguugaacauccugcauagugcugccaggaaaucccuauuuuauacuaagggggcuggcugguugcauauguaggaugucccaucuccccgcccacuucaucg

SEQ ID NO: 2909 - RNA, 91 nt, Canis familiaris
gaaagaugcugaacuguuuuugcgauguguuccuaauaugcaguaugaacauauugggagcauuuugcaugcaugguuuuguaucaauaua

SEQ ID NO: 2910 - RNA, 72 nt, Mus musculus
cuugggaauggcgaggaaaccguuaccauuacugaguuuaguaaugguaacgguucucuugcugcucccaca

SEQ ID NO: 2911 - RNA, 72 nt, Rattus norvegicus
uuugggaauggcgaggaaaccguuaccauuacugaguuuaguaaugguaaugguucucuugcugcucccaca

SEQ ID NO: 2912 - RNA, 72 nt, Macaca mulatta
cuugggaauggcaaggaaaccguuaccauuacugaguuuaguaaugguaaggguucucuugcuauauccaga

SEQ ID NO: 2913 - RNA, 62 nt, Monodelphis domestica
cuggcggggaaaccguuaccauuacuguguuuaguaaugguaaggguucucccgcugcgcug

SEQ ID NO: 2914 - RNA, 69 nt, Gallus gallus
acacauggcuggcagggaaaccguuaccauuacugaguuuaguaaugguaacgguucugcugacagcca

SEQ ID NO: 2915 - RNA, 62 nt, Xenopus tropicalis
gaguggcaaugaaaccguuaccauuacugaguuuaguaaugguaaggguucuguugcugcuc

SEQ ID NO: 2916 - RNA, 60 nt, Danio rerio
agaggcggcgaaaccguuaccauuacugaguuuaguaaugguaaggguucugcugccuuu

SEQ ID NO: 2917 - RNA, 85 nt, Mus musculus
gcuaagcaguuacaacuguuugcagaggaaacugagacuuuauaacuaugucucagucucaucugcaaagagguaagugcuuugc

SEQ ID NO: 2918 - RNA, 82 nt, Mus musculus
ugguacuuggagagugguuaucccuguccucuucgcuucacucaugccgaaucguacagggucauccacuuuuucaguauca

SEQ ID NO: 2919 - RNA, 82 nt, Rattus norvegicus
ugguacuuggagagugguuaucccuguccucuucgcuucacuuaugccgaaucguacagggucauccacuuuuucaguauca

SEQ ID NO: 2920 - RNA, 84 nt, Macaca mulatta
uugguacuuggagagugguuaucccuguccuguucguuuugcucgugucgaaucguacagggucauccacuuuuucaguaucaa

SEQ ID NO: 2921 - RNA, 84 nt, Bos taurus
uugguacuuggagagugguuaucccuguccuguucguuuuacucaugucgaaucguacagggucauccacuuuuucaguaucaa

SEQ ID NO: 2922 - RNA, 84 nt, Gallus gallus
gugguggcuugguggucguauguaugacgucauuuacuuggacuuuuaggagugacaucauauguacggcugcuaaacugcugc

SEQ ID NO: 2923 - RNA, 84 nt, Xenopus tropicalis
gugguggcuuaguggucguauguaugacgucauuuacuggauuuuuuaggagugacaucauauguacggcugcuaaacugcugc

SEQ ID NO: 2924 - RNA, 104 nt, Danio rerio
acugacuugagugguggccugguggucguauguaugacgucauuuacuucaaaguuuggagugacaucauauguacggcugcuaaacugcuacauggcucauca

SEQ ID NO: 2925 - RNA, 102 nt, Fugu rubripes
cuucugauacuggugguggcuugguggucguaugcaugacgucauuuacuucgaugauuggagugacaucauauguacggcugcuaaacugcuacaagagac

SEQ ID NO: 2926 - RNA, 92 nt, Tetraodon nigroviridis
uggugguggccugguggucguaugcaugacgucauuuacuucgaugauuggagugacaucauauguacggcugcuaaaccgcuacaagagac

SEQ ID NO: 2927 - RNA, 92 nt, Ateles geoffroyi
caaguuguuugugguacccuacuccgaagagugucaaucauguguaauucaauuugauugacacuuuugugaguagaguaacauacgacaug

SEQ ID NO: 2928 - RNA, 92 nt, Macaca mulatta
auguugucugugguacccuacucuggagagugacaaucauguauaauuaaauuugauugacacuucugugaguagaguaaugcaugacacgu

SEQ ID NO: 2929 - RNA, 88 nt, Macaca mulatta
guugucugugguacccuacucuggagagugacaaucauguauaauuaaauuugauugacacuucugugaguagaguaaugcaugacac

SEQ ID NO: 2930 - RNA, 92 nt, Pygathrix bieti
auguugucugugguacccuacucuggagagugacaaucauguauaauuaaauuugauugacacuucugugaguagaguaacguaugacacgu

SEQ ID NO: 2931 - RNA, 85 nt, Pan troglodytes
ugucugugguacccuacucuggaaagugacaaucauguauaauuaaauuugauugacacuucugugaguagaguaacgcaugaca

SEQ ID NO: 2932 - RNA, 88 nt, Pan troglodytes
uguugucugugguacccuacucuggagagugacaaucauguauaacuaaauuugauugacacuucugugaguagaguaacgcaugaca

SEQ ID NO: 2933 - RNA, 85 nt, Pan troglodytes
ugucugugguacccuacucuggagagugacaaucauguauaacuaaauuugauugacacuucugugaguagaguaacgcaugaca

SEQ ID NO: 2934 - RNA, 85 nt, Pan troglodytes
ugucugugguacccuacucuggagagugacaaucauguauaacuaaauuugauugacacuucugugaguagaguaacgccugaca

SEQ ID NO: 2935 - RNA, 92 nt, Symphalangus syndactylus
auguugucugugguacccuacucuggauagugacaaucauguguaauuaaauuugauugacacuucugugaguagaguaacgcaugacacgu

SEQ ID NO: 2936 - RNA, 101 nt, Macaca mulatta
gcgagaagauuucaugcugugacucucuggagggaagcgcuuucuguugucugaaagaaaacaaagcgcuucucuuuagagaguuacgguuugagaaaagc

SEQ ID NO: 2937 - RNA, 84 nt, Macaca mulatta
caugcugugacucucuggagggaagcgcuuucuguugucugaaagaaaacaaagcgcuucucuuuagagaguuacgguuugaga

SEQ ID NO: 2938 - RNA, 85 nt, Mus musculus
ggaucucagacgucucggggaucaucaugucacgagauaccacugugcccuugugacagauugauaacugaaaggucugggagcc

SEQ ID NO: 2939 - RNA, 79 nt, Rattus norvegicus
ucucagacgucucggggaucaucaugucacgagauaccacugcgcacuugugacagauugauaacugaaaggucuggga

SEQ ID NO: 2940 - RNA, 97 nt, Macaca mulatta
cagaccucagacaucucggggaucaucaugucacgagauaccacugugcacuugugacagauugauaacugaaaggucugggagccauucaucuuca

SEQ ID NO: 2941 - RNA, 78 nt, Mus musculus
caccuagggaucuuguuaaaaagcagagucugauugaggggccaagauucugcauuuuuagcaagcucucaagugaug

SEQ ID NO: 2942 - RNA, 91 nt, Macaca mulatta; identical to SEQ ID NO: 1690

SEQ ID NO: 2943 - RNA, 79 nt, Macaca mulatta
ugcaugaguucaucuuggucuaggauuguuggaggagucagaaaaauuaccccagggauccugaagucauuggggugga

SEQ ID NO: 2944 - RNA, 94 nt, Macaca mulatta
ugcucugcuuuuccuaggguguugcucucaucucuggucuauaaugggguaaauguagagaugagggcaacagccuaggaacagcagaggaacc

SEQ ID NO: 2945 - RNA, 94 nt, Macaca mulatta
cgccuccugccgcagugccugacgggaggcggagcggcgaacgaggccgucggccauuuugugucugcuuccugugggacgcggucguagccgu

SEQ ID NO: 2946 - RNA, 92 nt, Macaca mulatta
uuuuauuuaguauucuuccaucaguguucauaagggauguuggucuguaguuuucuuauaguguggcuugcuuagagcaaaggugguucccu

SEQ ID NO: 2947 - RNA, 87 nt, Mus musculus
accgcagggaaaaugagggacuuuugggggcagauguguuuccauuccgcuaucauaaugccccuaaaaauccuuauugcucuugca

SEQ ID NO: 2948 - RNA, 112 nt, Mus musculus
agagugaucaaggacagcaagaaaaaugagggacuuucaggggcagcuguguuuccugacucagucauaaugccccuaaaaauccuuauuguucuugcagugugcaucggag

SEQ ID NO: 2949 - RNA, 86 nt, Rattus norvegicus
acagcaagaaaaaugagggacuuucaggggcagcuguguuuccugacucagucauaaugccccuaaaaauccuuauuguucuugca

SEQ ID NO: 2950 - RNA, 87 nt, Macaca mulatta; identical to SEQ ID NO: 1706

SEQ ID NO: 2951 - RNA, 111 nt, Macaca mulatta
agaguguucaaggacagcaagaaaaaugagggacuuucaggggcagcuguguuuucugacucagucauaaugccccuaaaaauccuuauuguucuugcagugugcaucagg

SEQ ID NO: 2952 - RNA, 87 nt, Canis familiaris; identical to SEQ ID NO: 1706

SEQ ID NO: 2953 - RNA, 111 nt, Canis familiaris; identical to SEQ ID NO: 1707

SEQ ID NO: 2954 - RNA, 87 nt, Monodelphis domestica
ccgcagggaaaaugagggacuuuugggggcagauguguuuccauuacacuaucauaaugccccuaaaaauccuuauugcucuugcag

SEQ ID NO: 2955 - RNA, 85 nt, Gallus gallus
cgcagggaaaaugagggacuuuugggggcagauguguuuccauuacacuaucauaaugccccuaaaaauccuuauugcucuugca

SEQ ID NO: 2956 - RNA, 96 nt, Gallus gallus
ggcagcaagaaaaaugagggacuuucaggggcagcuguguuuuacuaacccagucauaaugccccuaaaaauccuuauuguucuugcaauggucaa

SEQ ID NO: 2957 - RNA, 86 nt, Xenopus tropicalis
ccgcagggaaaaugagggacuuuugggggcagauguguuucacuuacacuaccauaaugccccuaaaaauccuuauuguucuugca

SEQ ID NO: 2958 - RNA, 87 nt, Bos taurus
accgcagggaaaaugagggacuuuugggggcagauguguuugcauuccacuaucauaaugccccuaaaaauccuuauugcucuugca

SEQ ID NO: 2959 - RNA, 89 nt, Danio rerio
ccgcagggagaaugaggggcuuuugggggcacuuguguuucaguuucaccaucauaaugccccuaaaaauccuuauugcucuugcacug

SEQ ID NO: 2960 - RNA, 98 nt, Danio rerio
aggcagcaagaaaaaugagggacuuuuaggggcagcuguguuuuauuaacccagucauaaugccccuaaaaauccuuauugcucuugcaauuuucagc

SEQ ID NO: 2961 - RNA, 99 nt, Danio rerio
aagucagcaagaaaagugagggacuuuuaggggcagcuguguuauacugacccagucauaaugccccuaaaaauccuuauugcucuugcagugcucaac

SEQ ID NO: 2962 - RNA, 99 nt, Danio rerio; identical to SEQ ID NO: 2961

SEQ ID NO: 2963 - RNA, 95 nt, Fugu rubripes
cagcaagaaaagugagggacuuuuaggggcagcuguguuuuauuaacccagucauaaugccccuaaaaauccuuauugcucuugcaauugucaac

SEQ ID NO: 2964 - RNA, 92 nt, Tetraodon nigroviridis
cagcaagaaaagugagggacuuuuaggggcagcuguguuuuauuaacccagucauaaugccccuaaaaauccuuauugcucuugcaauuguc

SEQ ID NO: 2965 - RNA, 88 nt, Gallus gallus
gacagugcagucacccauaaaguagaaagcacuacuaaacagcacugcaggguguaguguuuccuacuuuauggaugaguguacugug

SEQ ID NO: 2966 - RNA, 89 nt, Rattus norvegicus
cugggccucugugggcaucuuaccggacagugcuggauuucuuggcuugacucuaacacugucugguaacgauguucaaaggugaccca

SEQ ID NO: 2967 - RNA, 90 nt, Macaca mulatta
ccgggccccugugagcaucuuaccggacagugcuggauuucccagcuugacucuaacacugucugguaacgauguucaaaggugacccac

SEQ ID NO: 2968 - RNA, 87 nt, Gallus gallus
gguccucugugggcaucuuacuagacagugcuggauuucuuggaucuauucuaacacugucugguaacgauguuuaaagggugaacc

SEQ ID NO: 2969 - RNA, 89 nt, Xenopus tropicalis
ugguccucuauggacaucuuacuagacagugcuggauuuauuuuaucuuuucuaacacugucugguaacgauguuuaaagagugagcca

SEQ ID NO: 2970 - RNA, 86 nt, Bos taurus
gggccucuguggacaucuuaccggacagugcuggauuucucggcucgacucuaacacugucugguaacgauguucaaaggugaccc

SEQ ID NO: 2971 - RNA, 86 nt, Danio rerio
ggcacuuagcagccaucuuaccggacagugcuggacuguauaacuguuuucuaacacugucugguaacgauguuuguugggugacc

SEQ ID NO: 2972 - RNA, 83 nt, Fugu rubripes
ucucaggauccaucuuacccgacagugcuggauuguacuacuguuguucuaacacugucugguaacgauguuuucugggugac

SEQ ID NO: 2973 - RNA, 62 nt, Tetraodon nigroviridis
caucuuaccugacagugcuggauuauacuacuguuguucuaacacugucugguaacgauguu

SEQ ID NO: 2974 - RNA, 70 nt, Mus musculus
gaagcuuaucagaaucuccagggguacuuaguauuugaaaagucccccaggugugauucugauuuguuuc

SEQ ID NO: 2975 - RNA, 70 nt, Rattus norvegicus
gaagcuuaucagaaucuccagggguacuuauuauuugaaaagucccccaggugugauucugauucguuuc

SEQ ID NO: 2976 - RNA, 63 nt, Canis familiaris
uuaucagaaucuccagggguacuuaaaauuugaaaaagucccccaggugugauucugauuugc

SEQ ID NO: 2977 - RNA, 71 nt, Bos taurus
ggagcuuaucagaaucuccagggguacuuauaauuugaaaaagucccccaggugugauucugauuugcuuc

SEQ ID NO: 2978 - RNA, 83 nt, Homo sapiens
ccuuggaguaaaguagcagcacauaaugguuuguggauuuugaaaaggugcaggccauauugugcugccucaaaaauacaagg

SEQ ID NO: 2979 - RNA, 98 nt, Homo sapiens
uugaggccuuaaaguacuguagcagcacaucaugguuuacaugcuacagucaagaugcgaaucauuauuugcugcucuagaaauuuaaggaaauucau

SEQ ID NO: 2980 - RNA, 98 nt, Homo sapiens
cgaggggauacagcagcaauucauguuuugaaguguucuaaaugguucaaaacgugaggcgcugcuauacccccucguggggaagguagaaggugggg

SEQ ID NO: 2981 - RNA, 112 nt, Homo sapiens
ccaccccgguccugcucccgccccagcagcacacugugguuuguacggcacuguggccacguccaaaccacacugugguguuagagcgagggugggggaggcaccgccgagg

SEQ ID NO: 2982 - RNA, 84 nt, Mus musculus
cccuuggaguaaaguagcagcacauaaugguuuguggauguugaaaaggugcaggccauacugugcugccucaaaauacaagga

SEQ ID NO: 2983 - RNA, 64 nt, Mus musculus
cuguagcagcacaucaugguuuacauacuacagucaagaugcgaaucauuauuugcugcucuag

SEQ ID NO: 2984 - RNA, 95 nt, Mus musculus
ccucguugacuccgaagggcugcagcagcaauucauguuuuggaguauugccaagguucaaaacaugaagcgcugcaacaccccuucguggggaa

SEQ ID NO: 2985 - RNA, 84 nt, Mus musculus
ccugcccccgccccagcagcacacugugguuuguacggcacuguggccacguccaaaccacacugugguguuagagcgagggua

SEQ ID NO: 2986 - RNA, 98 nt, Rattus norvegicus
uuggaaccuuaaaguacuguagcagcacaucaugguuuacauacuacagucaagaugcgaaucauuauuugcugcucuagaaauuuaaggaaauucau

SEQ ID NO: 2987 - RNA, 95 nt, Rattus norvegicus
ccucgcugacuccgaagggaugcagcagcaauucauguuuuggaguauugccaagguucaaaacaugaagcgcugcaacaccccuucgugggaaa

SEQ ID NO: 2988 - RNA, 69 nt, Rattus norvegicus
ccagcagcacacugugguuuguacggcacuguggccacguccaaaccacacugugguguuagagcgagg

SEQ ID NO: 2989 - RNA, 83 nt, Ateles geoffroyi; identical to SEQ ID NO: 2978

SEQ ID NO: 2990 - RNA, 98 nt, Ateles geoffroyi
uugaggccuuaaaguacuguagcagcacaucaugguuuacauacuacagucaagaugcgaaucauuauuugcugcucuagaaauuuaaggaaauucau

SEQ ID NO: 2991 - RNA, 83 nt, Lagothrix lagotricha; identical to SEQ ID NO: 2978

SEQ ID NO: 2992 - RNA, 98 nt, Lagothrix lagotricha; identical to SEQ ID NO: 2990

SEQ ID NO: 2993 - RNA, 83 nt, Saguinus labiatus; identical to SEQ ID NO: 2978

SEQ ID NO: 2994 - RNA, 83 nt, Macaca mulatta; identical to SEQ ID NO: 2978

SEQ ID NO: 2995 - RNA, 98 nt, Macaca mulatta; identical to SEQ ID NO: 2990

SEQ ID NO: 2996 - RNA, 98 nt, Macaca mulatta; identical to SEQ ID NO: 2980

SEQ ID NO: 2997 - RNA, 112 nt, Macaca mulatta; identical to SEQ ID NO: 2981

SEQ ID NO: 2998 - RNA, 83 nt, Macaca nemestrina; identical to SEQ ID NO: 2978

SEQ ID NO: 2999 - RNA, 98 nt, Macaca nemestrina; identical to SEQ ID NO: 2990

SEQ ID NO: 3000 - RNA, 83 nt, Gorilla gorilla; identical to SEQ ID NO: 2978

SEQ ID NO: 3001 - RNA, 98 nt, Gorilla gorilla; identical to SEQ ID NO: 2979

SEQ ID NO: 3002 - RNA, 83 nt, Pan paniscus; identical to SEQ ID NO: 2978

SEQ ID NO: 3003 - RNA, 98 nt, Pan paniscus; identical to SEQ ID NO: 2979

SEQ ID NO: 3004 - RNA, 83 nt, Pan troglodytes; identical to SEQ ID NO: 2978

SEQ ID NO: 3005 - RNA, 98 nt, Pan troglodytes; identical to SEQ ID NO: 2979

SEQ ID NO: 3006 - RNA, 83 nt, Pongo pygmaeus; identical to SEQ ID NO: 2978

SEQ ID NO: 3007 - RNA, 98 nt, Pongo pygmaeus; identical to SEQ ID NO: 2979

SEQ ID NO: 3008 - RNA, 83 nt, Lemur catta; identical to SEQ ID NO: 2978

SEQ ID NO: 3009 - RNA, 59 nt, Canis familiaris
uagcagcacauaaugguuuguggauuuugaaaaggugcaggccauauugugcugccuca

SEQ ID NO: 3010 - RNA, 60 nt, Canis familiaris
uagcagcacaucaugguuuacauacuacagucaagaugcgaaucauuauuugcugcucua

SEQ ID NO: 3011 - RNA, 67 nt, Canis familiaris
cagcagcacacugugguuuguacgguacuguggccacguccagaccacacugugguguuagggugag

SEQ ID NO: 3012 - RNA, 83 nt, Monodelphis domestica
ccuugggguaaaguagcagcacauaaugguuuguugguuuugaaaaggugcaggccauauugugcugccucaaaaauacaagg

SEQ ID NO: 3013 - RNA, 83 nt, Gallus gallus
ccuuggcauaacguagcagcacauaaugguuuguggguuuugaaaaggugcaggccauauugugcugccucaaaaauacaagg

SEQ ID NO: 3014 - RNA, 91 nt, Gallus gallus
ugaggccuuaaaguacucuagcagcacaucaugguuugcaugcuguagugaagaugcgaaucauuauuugcugcuuuagaaauuuaaggaa

SEQ ID NO: 3015 - RNA, 83 nt, Xenopus tropicalis
ccuugacguaaaguagcagcacauaaugguuuguggguuacacagaggugcaggccauacugugcugccgccaaaacacaagg

SEQ ID NO: 3016 - RNA, 88 nt, Xenopus tropicalis
uguccuaaagaaguguagcagcacaucaugauuugcaugcuguauuauagauucuaaucauuuuuugcugcuucaugauauugggaaa

SEQ ID NO: 3017 - RNA, 74 nt, Xenopus tropicalis
cuuugaggugaucuagcagcacaucaugguuuguagaaacaaggagauacagaccauucugagcugccucuuga

SEQ ID NO: 3018 - RNA, 83 nt, Bos taurus; identical to SEQ ID NO: 2978

SEQ ID NO: 3019 - RNA, 98 nt, Bos taurus
uugagaccuuaaaguacuguagcagcacaucaugguuuacauacuacagucaagaugcgaaucauuauuugcugcucuagaaauuuaaggaaauucau

SEQ ID NO: 3020 - RNA, 112 nt, Bos taurus
ccaccccaguccugcucccgccccagcagcacacugugguuuguacggcacuguggccacguccaaaccacacugugguguuagagcgagggugggggaggcaccgcugagg

SEQ ID NO: 3021 - RNA, 84 nt, Danio rerio
ccugucgguacuguagcagcacagaaugguuugugaguuauaacgggggugcaggccguacugugcugcggcaacaacgacagg

SEQ ID NO: 3022 - RNA, 102 nt, Danio rerio
gccgaggcucucuaggugaugguguagcagcacagaaugguuuguggugauacagagaugcaggccaugaugugcugcagcaucaauuccugggaccuacgc

SEQ ID NO: 3023 - RNA, 134 nt, Danio rerio
gucugucgucaucuuuuuauuuagcccugagugcccuguagcagcacaucaugguuuguaaguuauaagggcaaauuccgaaucaugaugugcugucacugggagccugggaguuucuccauuaacaugacagc

SEQ ID NO: 3024 - RNA, 83 nt, Danio rerio
ugccugacagaagcagcacaucaauauuggcagcugcccucucucuggguugccaguaugguuugugcugcucccgucagaca

SEQ ID NO: 3025 - RNA, 78 nt, Danio rerio
gaauguacuaaagcagcacauaaauacuggaggugauugugguguuauccaguauugcuguucugcuguaguaagacc

SEQ ID NO: 3026 - RNA, 71 nt, Fugu rubripes
cuggugaugcuguagcagcacggaaugguuuguggguuacacugagauacaggccauacugugcugccgca

SEQ ID NO: 3027 - RNA, 71 nt, Tetraodon nigroviridis
cuggugaugcuguagcagcacggaaugguuugugaguuacacugagauacaagccaugcugugcugccgca

SEQ ID NO: 3028 - RNA, 72 nt, Rattus norvegicus
guagugccaaagugcucauagugcagguagguuuugcugcacucuacugcagugugagcacuucugguacuc

SEQ ID NO: 3029 - RNA, 97 nt, Homo sapiens
uagccagucagaaaugagcuuauucauaaaagugcaguauggugaagucaaucuguaauuuuauguauaagcuagucucugauugaaacaugcagca

SEQ ID NO: 3030 - RNA, 81 nt, Mus musculus
agucagaaaugagcuuauucauaaaagugcaguauggugaagucaaucuguaauuuuauguauaagcuagucucugauuga

SEQ ID NO: 3031 - RNA, 97 nt, Macaca mulatta
uagccagucagaaaugagcuuauucauaaaagugcaguaugguggagucagucuguaauuuuauguauaagcuggucucuaacugaaacgugcagca

SEQ ID NO: 3032 - RNA, 78 nt, Homo sapiens
cuuucuacacagguugggaucgguugcaaugcuguguuucuguaugguauugcacuugucccggccuguugaguuugg

SEQ ID NO: 3033 - RNA, 75 nt, Homo sapiens
ucaucccuggguggggauuuguugcauuacuuguguucuauauaaaguauugcacuugucccggccuguggaaga

SEQ ID NO: 3034 - RNA, 96 nt, Homo sapiens
cgggccccgggcgggcgggagggacgggacgcggugcaguguuguuuuuucccccgccaauauugcacucgucccggccuccggcccccccggccc

SEQ ID NO: 3035 - RNA, 75 nt, Homo sapiens
uguugucggguggaucacgaugcaauuuugaugaguaucauaggagaaaaauugcacgguauccaucuguaaacc

SEQ ID NO: 3036 - RNA, 68 nt, Homo sapiens
ccauuacuguugcuaauaugcaacucuguugaauauaaauuggaauugcacuuuagcaauggugaugg

SEQ ID NO: 3037 - RNA, 80 nt, Mus musculus
cuuucuacacagguugggauuugucgcaaugcuguguuucucuguaugguauugcacuugucccggccuguugaguuugg

SEQ ID NO: 3038 - RNA, 91 nt, Mus musculus
ugcccauucauccacagguggggauugguggcauuacuuguguuagauauaaaguauugcacuugucccggccugaggaagaaagaggguu

SEQ ID NO: 3039 - RNA, 83 nt, Mus musculus
ggugggcgggagggacgggacguggugcaguguuguucuuuccccugccaauauugcacucgucccggccuccggcccccucg

SEQ ID NO: 3040 - RNA, 75 nt, Mus musculus
uguuaucagguggaacacgaugcaauuuugguugguguaauaggaggaaaauugcacgguauccaucuguaaacc

SEQ ID NO: 3041 - RNA, 75 nt, Mus musculus
aggccgucacuguugcuaacaugcaacucuguugaauagaaauuggaauugcacuuuagcaauggugauggaccu

SEQ ID NO: 3042 - RNA, 78 nt, Rattus norvegicus
cuuucuacacagguugggauuugucgcaaugcuguguuucuguauaguauugcacuugucccggccuguugaguuugg

SEQ ID NO: 3043 - RNA, 92 nt, Rattus norvegicus
ugcccauucauccacagguggggauuagugccauuacuuguguuagauaaaaaguauugcacuugucccggccugaggaagaaaagaggguu

SEQ ID NO: 3044 - RNA, 83 nt, Rattus norvegicus
ggugggcaggagggacgggacgcggugcaguguuguucuuuccccugccaauauugcacucgucccggccuccggcccccucg

SEQ ID NO: 3045 - RNA, 87 nt, Rattus norvegicus
uuuugcuguuaucggguggaucacgaugcaauuuugauuagaguaaugggagagaaauugcacgguauccaucuguaaaccgcagga

SEQ ID NO: 3046 - RNA, 78 nt, Ateles geoffroyi; identical to SEQ ID NO: 3032

SEQ ID NO: 3047 - RNA, 75 nt, Ateles geoffroyi; identical to SEQ ID NO: 3033

SEQ ID NO: 3048 - RNA, 78 nt, Lagothrix lagotricha; identical to SEQ ID NO: 3032

SEQ ID NO: 3049 - RNA, 75 nt, Lagothrix lagotricha; identical to SEQ ID NO: 3033

SEQ ID NO: 3050 - RNA, 78 nt, Saguinus labiatus; identical to SEQ ID NO: 3032

SEQ ID NO: 3051 - RNA, 75 nt, Saguinus labiatus; identical to SEQ ID NO: 3033

SEQ ID NO: 3052 - RNA, 78 nt, Macaca mulatta; identical to SEQ ID NO: 3032

SEQ ID NO: 3053 - RNA, 75 nt, Macaca mulatta; identical to SEQ ID NO: 3033

SEQ ID NO: 3054 - RNA, 96 nt, Macaca mulatta
cgggccccgggcgggcgggagggacgggacgcggugcaguguuguucuuucccccgccaauauugcacucgucccggccuccggcccccccggccc

SEQ ID NO: 3055 - RNA, 75 nt, Macaca mulatta
uguugucggguggaucacgaugcaauuuugauuaguaucauaggagaaaaauugcacgguauccaucuguaaacc

SEQ ID NO: 3056 - RNA, 68 nt, Macaca mulatta
ccacuacuguugcuaauaugcaacucuguugaacacaaauuggaauugcacuuuagcaauggugaugg

SEQ ID NO: 3057 - RNA, 75 nt, Macaca nemestrina; identical to SEQ ID NO: 3033

SEQ ID NO: 3058 - RNA, 78 nt, Gorilla gorilla; identical to SEQ ID NO: 3032

SEQ ID NO: 3059 - RNA, 75 nt, Gorilla gorilla; identical to SEQ ID NO: 3033

SEQ ID NO: 3060 - RNA, 78 nt, Pan paniscus; identical to SEQ ID NO: 3032

SEQ ID NO: 3061 - RNA, 75 nt, Pan paniscus; identical to SEQ ID NO: 3033

SEQ ID NO: 3062 - RNA, 78 nt, Pan troglodytes; identical to SEQ ID NO: 3032

SEQ ID NO: 3063 - RNA, 74 nt, Pan troglodytes
ucaucccuggguggggauuuguugcauuacuuguguuccacaaaaguauugcacuugucccggccugugagaga

SEQ ID NO: 3064 - RNA, 78 nt, Pongo pygmaeus; identical to SEQ ID NO: 3032

SEQ ID NO: 3065 - RNA, 75 nt, Pongo pygmaeus; identical to SEQ ID NO: 3033

SEQ ID NO: 3066 - RNA, 78 nt, Lemur catta; identical to SEQ ID NO: 3032

SEQ ID NO: 3067 - RNA, 75 nt, Lemur catta
ucauccguggguggggauuuguugcauuacuuguguuauauguaaaguauugcacuugucccggccuguggaaga

SEQ ID NO: 3068 - RNA, 59 nt, Canis familiaris
agguugggaucgguugcaaugcuguguuucuguaugguauugcacuugucccggccugu

SEQ ID NO: 3069 - RNA, 61 nt, Canis familiaris
ggguggggauuuguggcauuacuuguguuccauauaaaguauugcacuugucccggccugu

SEQ ID NO: 3070 - RNA, 63 nt, Canis familiaris
agggacgggacgcggugcaguguuguucucucccccgccaauauugcacucgucccggccucc

SEQ ID NO: 3071 - RNA, 67 nt, Canis familiaris
ucggguggaucacgaugcaauuuugaugaguauaauaggagaaaaauugcacgguauccaucuguaa

SEQ ID NO: 3072 - RNA, 78 nt, Monodelphis domestica
cuuucuacacagguugggaucaguugcaaugcugugucugucuguaguauugcacuugucccggccuguugaguuugg

SEQ ID NO: 3073 - RNA, 78 nt, Gallus gallus
cuuucuacacagguugggaucaguugcaaugcugugcguuucugugguauugcacuugucccggccuguugagguugg

SEQ ID NO: 3074 - RNA, 73 nt, Gallus gallus
aggcuaauacuguugcuaacaugcaacucuguuguauaaaaauuggaauugcacuuuagcaauggugauggac

SEQ ID NO: 3075 - RNA, 78 nt, Xenopus tropicalis
cuuucuguauagguugggauugguugcaaugcuguacuauuuauguaguauugcacuugucccggccuguuuaggaug

SEQ ID NO: 3076 - RNA, 73 nt, Xenopus tropicalis
uccucuguggguggggauuuguugcacuacuguauguaugaaaaguauugcacuugucccggccuguggguga

SEQ ID NO: 3077 - RNA, 73 nt, Xenopus tropicalis
uacagaaggaucgggauguugugcacuguuguccuuucuccugccaauauugcacucgucccggccuccugcg

SEQ ID NO: 3078 - RNA, 87 nt, Xenopus tropicalis
uuuuguuguucgcggguggaucacgaugcaauuuuauuuaguuugguaggagaaaaauugcacgguauccaucuguaaaccgcagaa

SEQ ID NO: 3079 - RNA, 63 nt, Xenopus tropicalis
uuacuguugccuaugugcaaacucugugcuauauugucuagaauugcacuguagcaaugguga

SEQ ID NO: 3080 - RNA, 68 nt, Bos taurus
uggguggggauuuguugcacugcuuguguuauauauaaaguauugcacuugucccggccuguggaaga

SEQ ID NO: 3081 - RNA, 85 nt, Danio rerio
uggucccuuucugcgcagguugggauugguagcaaugcuguguguuuugaagguauugcacuugucccggccuguaaaggauugu

SEQ ID NO: 3082 - RNA, 95 nt, Danio rerio
acagcaucccuuucuuugcagguugggaucggccgcaaugcucugugcuggaaguauugcacuugucccggccugugaagagcaugggaaauugu

SEQ ID NO: 3083 - RNA, 82 nt, Danio rerio
uccuacgggcagggaggugugggauguugugcaguguuguucaaucucccgccaauauugcacucgucccggccucccugac

SEQ ID NO: 3084 - RNA, 127 nt, Danio rerio
uaaaugcaaauauuugucuugcuguuuucggguggaugacucugcaauuuuauuagugauggaaaaacuucaauaaaaauugcacgguauccaucuguaauccgcuggauuccauuaccugcguuug

SEQ ID NO: 3085 - RNA, 79 nt, Fugu rubripes
cuuuccugugcagguugggagagguagcaaugcucagagauuaugcgguauugcacuugucccggccuguggaggaagg

SEQ ID NO: 3086 - RNA, 63 nt, Fugu rubripes
cagguggggaucaguagcaaugcugugcacuggaagguauugcacuugucccggccuguguag

SEQ ID NO: 3087 - RNA, 74 nt, Tetraodon nigroviridis
cuuuccuguacagguugggagagguagcaaugcucggaguucaugugguauugcacuugucccggccuguggag

SEQ ID NO: 3088 - RNA, 72 nt, Tetraodon nigroviridis
cuucccauacagguggggaugaguagcaaugcuguguacuaggagguauugcacuugucccggccuguguag

SEQ ID NO: 3089 - RNA, 77 nt, Homo sapiens; identical to SEQ ID NO: 1895

SEQ ID NO: 3090 - RNA, 84 nt, Homo sapiens; identical to SEQ ID NO: 1897

SEQ ID NO: 3091 - RNA, 77 nt, Homo sapiens
uguuuaucucuaggguugaucuauuagaauuacuuaucugagccaaaguaauucaaguaauucagguguagugaaac

SEQ ID NO: 3092 - RNA, 70 nt, Homo sapiens
guuguuguaaacauccccgacuggaagcuguaagacacagcuaagcuuucagucagauguuugcugcuac

SEQ ID NO: 3093 - RNA, 92 nt, Homo sapiens
gggcagucuuugcuacuguaaacauccuugacuggaagcuguaagguguucagaggagcuuucagucggauguuuacagcggcaggcugcca

SEQ ID NO: 3094 - RNA, 77 nt, Homo sapiens
agucuaguuacuaggcaguguaguuagcugauugcuaauaguaccaaucacuaaccacacggccagguaaaaagauu

SEQ ID NO: 3095 - RNA, 63 nt, Mus musculus
cgugcagcggggcgucauccgucagcucacauagugacgcaggcagugcgaccuggcucgcac

SEQ ID NO: 3096 - RNA, 78 nt, Homo sapiens
uacugcccucggcuucuuuacagugcugccuuguugcauauggaucaagcagcauuguacagggcuaugaaggcauug

SEQ ID NO: 3097 - RNA, 78 nt, Homo sapiens
uugugcuuucagcuucuuuacagugcugccuuguagcauucaggucaagcagcauuguacagggcuaugaaagaacca

SEQ ID NO: 3098 - RNA, 86 nt, Mus musculus
uucuuacugcccucggcuucuuuacagugcugccuuguugcauauggaucaagcagcauuguacagggcuaugaaggcauugagac

SEQ ID NO: 3099 - RNA, 86 nt, Mus musculus
gucuucgugcuuucagcuucuuuacagugcugccuuguagcauucaggucaagcagcauuguacagggcuaugaaagaaccaagaa

SEQ ID NO: 3100 - RNA, 86 nt, Rattus norvegicus; identical to SEQ ID NO: 3098

SEQ ID NO: 3101 - RNA, 86 nt, Rattus norvegicus; identical to SEQ ID NO: 3099

SEQ ID NO: 3102 - RNA, 78 nt, Ateles geoffroyi; identical to SEQ ID NO: 3096

SEQ ID NO: 3103 - RNA, 78 nt, Lagothrix lagotricha; identical to SEQ ID NO: 3096

SEQ ID NO: 3104 - RNA, 78 nt, Macaca mulatta; identical to SEQ ID NO: 3096

SEQ ID NO: 3105 - RNA, 78 nt, Macaca mulatta; identical to SEQ ID NO: 3097

SEQ ID NO: 3106 - RNA, 78 nt, Macaca nemestrina; identical to SEQ ID NO: 3096

SEQ ID NO: 3107 - RNA, 78 nt, Gorilla gorilla; identical to SEQ ID NO: 3096

SEQ ID NO: 3108 - RNA, 78 nt, Pan paniscus; identical to SEQ ID NO: 3096

SEQ ID NO: 3109 - RNA, 78 nt, Pan troglodytes; identical to SEQ ID NO: 3096

SEQ ID NO: 3110 - RNA, 78 nt, Pongo pygmaeus; identical to SEQ ID NO: 3096

SEQ ID NO: 3111 - RNA, 62 nt, Canis familiaris
ucggcuucuuuacagugcugccuuguugcauauggaucaagcagcauuguacagggcuauga

SEQ ID NO: 3112 - RNA, 76 nt, Monodelphis domestica
uugucuucggcuucuuuacagugcugccuuguugcauauggaucaagcagcauuguacagggcuaugaagacauug

SEQ ID NO: 3113 - RNA, 84 nt, Monodelphis domestica
cuuggugcuuucagcuucuuuacagugcugccuuguugcauugaugucaagcagcauuguacagggcuaugaaagaaccaagau

SEQ ID NO: 3114 - RNA, 78 nt, Gallus gallus
ugcugccuucggcuucuuuacagugcugccuuguugcauauggaucaagcagcauuguacagggcuaugaaggcacug

SEQ ID NO: 3115 - RNA, 83 nt, Gallus gallus
ucucugugcuuucagcuucuuuacagugcugccuuguugcguucaugucaagcagcauuguacagggcuaugaaagaacagag

SEQ ID NO: 3116 - RNA, 85 nt, Xenopus tropicalis
uucucauuuccuuuggcuucuuuacagugcugccuuguugcauauggaucaagcagcauuguacagggcuaugaaggaucugaga

SEQ ID NO: 3117 - RNA, 83 nt, Xenopus tropicalis
cucugugcuuucagcuucuuuacagugcugccuuguagcaucuaugucaagcagcauuguacagggcuaugaaggagcagaga

SEQ ID NO: 3118 - RNA, 72 nt, Bos taurus
cugcccucggcuucuuuacagugcugccuuguugcauauggaucaagcagcauuguacagggcuaugaaggc

SEQ ID NO: 3119 - RNA, 76 nt, Bos taurus
uugugcuuucagcuucuuuacagugcugccuuguagcauucaggucaagcagcauuguacagggcuaugaaagaac

SEQ ID NO: 3120 - RNA, 82 nt, Sus scrofa
cuuacugcccucggcuucuuuacagugcugccuuguugcauauggaucaagcagcauuguacagggcuaugaaggcacugag

SEQ ID NO: 3121 - RNA, 88 nt, Danio rerio
uugcccuggucugucagccucuuuacggugcugccuuguggaaucuggaucaagcagcauuguacagggcuaugagagacccgggccc

SEQ ID NO: 3122 - RNA, 82 nt, Fugu rubripes
cucuccgcuuuuagccucuuuacagugcugccuugucuaaucauguucaagcagcauuguacagggcuaugacagcguagag

SEQ ID NO: 3123 - RNA, 86 nt, Tetraodon nigroviridis
uugcucuacgcuuuuagccucuuuacagugcugccuugcucuacucauguucaagcagcauuguacagggcuaugacagcguagag

SEQ ID NO: 3124 - RNA, 68 nt, Homo sapiens; identical to SEQ ID NO: 1988

SEQ ID NO: 3125 - RNA, 87 nt, Homo sapiens
ugucccccccggcccagguucugugauacacuccgacucgggcucuggagcagucagugcaugacagaacuugggcccggaaggacc

SEQ ID NO: 3126 - RNA, 73 nt, Mus musculus
ccgggccuagguucugugauacacuccgacucgggcucuggagcagucagugcaugacagaacuugggcccgg

SEQ ID NO: 3127 - RNA, 85 nt, Rattus norvegicus
uguuccccgggcccagguucugugauacacuccgacucgggcucuggagcagucagugcaugacagaacuugggcccgguaggac

SEQ ID NO: 3128 - RNA, 87 nt, Macaca mulatta; identical to SEQ ID NO: 3125

SEQ ID NO: 3129 - RNA, 59 nt, Canis familiaris
agguucugugauacacuccgacucgggcucuggagcagucagugcaugacagaacuugg

SEQ ID NO: 3130 - RNA, 73 nt, Monodelphis domestica
cccggcccagguucugugauacacuccgacuuagacucuggagcagucagugcaugacagaacuugggcuugg

SEQ ID NO: 3131 - RNA, 80 nt, Danio rerio
cuguucaccuggcucaaguucugugauacacucagacuuugaaucagugguagucagugcaugacagaacuuuggcccgg

SEQ ID NO: 3132 - RNA, 71 nt, Fugu rubripes
ggcuaaguucugugauacacucugacugugaaugucuaugcuagucagugcauaacagaacuuugucccgg

SEQ ID NO: 3133 - RNA, 85 nt, Tetraodon nigroviridis
cugcucaaacucugggcuaaguucugugauacacucugacugugaauggcuaugcuagucagugcauaacagaacuuugucccgg

SEQ ID NO: 3134 - RNA, 79 nt, Homo sapiens
ugcuucugugugauauguuugauauuggguuguuuaauuaggaaccaacuaaaugucaaacauauucuuacagcagcag

SEQ ID NO: 3135 - RNA, 77 nt, Homo sapiens; identical to SEQ ID NO: 2042

SEQ ID NO: 3136 - RNA, 80 nt, Danio rerio
ucuacugacagagaagcuuuuuguuuguguuauguuuauuuucaaauguaagacgaacaaaaaguuuuucuguuaguagg

SEQ ID NO: 3137 - RNA, 110 nt, Homo sapiens
ggcuacagucuuucuucaugugacucguggacuucccuuugucauccuaugccugagaauauaugaaggaggcugggaaggcaaagggacguucaauugucaucacuggc

SEQ ID NO: 3138 - RNA, 68 nt, Mus musculus
uggacuucccuuugucauccuaugccugagaauauaugaaggaggcugggaaggcaaagggacguuca

SEQ ID NO: 3139 - RNA, 110 nt, Rattus norvegicus
ggcuacagcccuucuucaugugacucguggacuucccuuugucauccuaugccugagaauauaugaaggaggcugggaaggcaaagggacguucaauugucaucacuggc

SEQ ID NO: 3140 - RNA, 110 nt, Saguinus labiatus; identical to SEQ ID NO: 3137

SEQ ID NO: 3141 - RNA, 110 nt, Macaca mulatta; identical to SEQ ID NO: 3137

SEQ ID NO: 3142 - RNA, 110 nt, Macaca nemestrina; identical to SEQ ID NO: 3137

SEQ ID NO: 3143 - RNA, 110 nt, Gorilla gorilla; identical to SEQ ID NO: 3137

SEQ ID NO: 3144 - RNA, 110 nt, Pan paniscus; identical to SEQ ID NO: 3137

SEQ ID NO: 3145 - RNA, 110 nt, Pan troglodytes; identical to SEQ ID NO: 3137

SEQ ID NO: 3146 - RNA, 110 nt, Pongo pygmaeus; identical to SEQ ID NO: 3137

SEQ ID NO: 3147 - RNA, 60 nt, Canis familiaris
uucccuuugucauccuaugccugagaauauaugaaggaggcugggaaggcaaagggacgu

SEQ ID NO: 3148 - RNA, 97 nt, Monodelphis domestica
caacugacuaugugaccugugggcuucccuuugucauccuaugccuggaaaucagaguggggcagggacagcaaagggaugcucagcugucgucuuc

SEQ ID NO: 3149 - RNA, 104 nt, Gallus gallus
gucaacagugucuguucaugugacccguggacuucccuuugucauccuaugccugaaaauauaugaagggggcggggaaggcaaagggacguucaacugucauc

SEQ ID NO: 3150 - RNA, 101 nt, Gallus gallus
cuacugagacugugugaccugugggcuucccuuugucauccuaugccuggagaucacagugaggcagggacagcaaagggaugcucagcugucgucucuuc

SEQ ID NO: 3151 - RNA, 105 nt, Xenopus tropicalis
uagaggacuucgacauugugacccaugggcuucccuuugucauccuaugccugagaaugcuggagaggcagggacagcaaagggaugcucagauguuaccucuug

SEQ ID NO: 3152 - RNA, 88 nt, Xenopus tropicalis
augugaccugugggcuucccuuugucauccuaugccugagaauauaugaagggggcugggaaggcaaagggacguucaguugucauca

SEQ ID NO: 3153 - RNA, 96 nt, Bos taurus
uuucuucaugugacucguggacuucccuuugucauccuaugccugagaauauaugaaggaggcugggaaggcaaagggacguucaauugucaucac

SEQ ID NO: 3154 - RNA, 109 nt, Sus scrofa
ggcuacaguccuucucaugugacucguggacuucccuuugucauccuaugccugagaauauaugaaggaggcugggaaggcaaagggacguucaauugucaucacuggc

SEQ ID NO: 3155 - RNA, 93 nt, Danio rerio
ucaugugaccuguggacuucccuuugucauccuaugccuggaguaauagagggggcugggaagucaaagggacgcucaggcgucaucauucgc

SEQ ID NO: 3156 - RNA, 124 nt, Danio rerio
guguugcucuagugaccaguuugugaccuccuggguuucccuuugucauccuaugccugcaguuccugaugaggcugggacagcaaagggagguucagaugucgaccuguacuacagucaauac

SEQ ID NO: 3157 - RNA, 124 nt, Danio rerio; identical to SEQ ID NO: 3156

SEQ ID NO: 3158 - RNA, 92 nt, Fugu rubripes
ugugaccugugggcuucccuuugucauccuaugccuggagcucggauaaggcagggacagcaaagggaugcucagcugucaccacugacauc

SEQ ID NO: 3159 - RNA, 93 nt, Tetraodon nigroviridis
ugugaccugugggcuucccuuugucauccuaugccuggagcucggauaaggcagggacagcaaagggaugcucagccgucaccacugacuuca

SEQ ID NO: 3160 - RNA, 86 nt, Tetraodon nigroviridis
augugaccuauggacuucccuuuguuauccuaugccuggacucaaaaaaggggcugggagggcaaaggguugcccaguugucauac

SEQ ID NO: 3161 - RNA, 76 nt, Mus musculus
uggcaaguggaggagcagcagggugaaacugacacagugcuggugaguuucacuuugcugcuccuccugacuccca

SEQ ID NO: 3162 - RNA, 65 nt, Mus musculus
cucgaauccuuggaaccuaggugugaaugcugcuucagugcaacacaccuguucaaggauucaaa

SEQ ID NO: 3163 - RNA, 65 nt, Macaca mulatta
cucgaauccuuggaaccuaggugugagugcuauuucagugcaacacaccuauucaaggauucaaa

SEQ ID NO: 3164 - RNA, 107 nt, Mus musculus
acugcugcaguggcagcuugguugucauaugugugaugacacuuucuaaagucuuccagaaugacaccacauauauggcagcuaaacuguuacauggaacaacaagu

SEQ ID NO: 3165 - RNA, 90 nt, Danio rerio
ugaugcugaucuggaaugacacguuuucucccggaucgccagaaauauguuucgccaccgggaacuucgugucagccaagauuggcauca

SEQ ID NO: 3166 - RNA, 98 nt, Rattus norvegicus
cugcagccagaguuuuuaccagucaggcuccuggcuagauuccagguaccaacugguaccugaucuagccaaagccugaccguaagcugcaaaagaaa

SEQ ID NO: 3167 - RNA, 84 nt, Homo sapiens
ucucaugcagucauucuccaaaagggagcacuuucuguuugaaagaaaacaaagugccuccuuuuagaguguuacuguuugaga

SEQ ID NO: 3168 - RNA, 69 nt, Homo sapiens
ccaccacuuaaacguggauguacuugcuuugaaacuaaagaaguaagugcuuccauguuuuggugaugg

SEQ ID NO: 3169 - RNA, 68 nt, Homo sapiens
ccucuacuuuaacauggaggcacuugcugugacaugacaaaaauaagugcuuccauguuugagugugg

SEQ ID NO: 3170 - RNA, 72 nt, Homo sapiens
uuggguaagugcuuccaugcuucaguuuccuuacugguaagauggauguaguaauagcaccuaccuuauaga

SEQ ID NO: 3171 - RNA, 67 nt, Homo sapiens
gugggccucaaauguggagcacuauucugauguccaaguggaaagugcugcgacauuugagcgucac

SEQ ID NO: 3172 - RNA, 85 nt, Homo sapiens
cucaggcugugacccuccagagggaaguacuuucuguugucugagagaaaagaaagugcuucccuuuggacuguuucgguuugag

SEQ ID NO: 3173 - RNA, 61 nt, Homo sapiens
cccucuacagggaagcgcuuucuguugucugaaagaaaagaaagugcuuccuuuuagaggg

SEQ ID NO: 3174 - RNA, 87 nt, Homo sapiens
ucucaggcugucguccucuagagggaagcacuuucuguugucugaaagaaaagaaagugcuuccuuuuagaggguuaccguuugaga

SEQ ID NO: 3175 - RNA, 87 nt, Homo sapiens
ucuccugcugugacccucaagauggaagcaguuucuguugucugaaaggaaagaaagugcuuccuuuuugaggguuacuguuugaga

SEQ ID NO: 3176 - RNA, 82 nt, Mus musculus
ccuauguagcggccaucaaaguggaggcccucucuugagccugaaugagaaagugcuuccacuuugugugccacugcauggg

SEQ ID NO: 3177 - RNA, 84 nt, Mus musculus
uuccauauagccauacucaaaauggaggcccuaucuaagcuuuuaaguggaaagugcuucccuuuuguguguugccauguggag

SEQ ID NO: 3178 - RNA, 69 nt, Mus musculus
ggugagacucaaauguggggcacacuucuggacuguacauagaaagugcuacuacuuuugagucucucc

SEQ ID NO: 3179 - RNA, 69 nt, Mus musculus
ccaccacuuaaacgugguuguacuugcuuuagaccuaagaaaguaagugcuuccauguuuuggugaugg

SEQ ID NO: 3180 - RNA, 66 nt, Mus musculus
ccuuuacuuuaacauggaggcacuugcugugcauuuaaaaauaagugcuuccauguuugagugugg

SEQ ID NO: 3181 - RNA, 82 nt, Rattus norvegicus
ccgguguaguagccaucaaaguggaggcccucucuugggcccgagcuagaaagugcuuccacuuugugugccacugcauggg

SEQ ID NO: 3182 - RNA, 80 nt, Ateles geoffroyi
cugggggcuccaaagugcuguucgugcagguagugugauuaccugaccuacugcugagcuagcacuucccgagcccccgg

SEQ ID NO: 3183 - RNA, 80 nt, Lagothrix lagotricha
cucggggcuccaaagugcuguucgugcagguagugugauuaccugaccuacugcugagcuagcacuucccgagcccccgg

SEQ ID NO: 3184 - RNA, 80 nt, Saguinus labiatus
cugggggcuccaaagugcuguucgugcagguagugugauuacccaaccuacugcugagcuagcacuucccgagcccccgg

SEQ ID NO: 3185 - RNA, 80 nt, Macaca mulatta
cugggggcuccaaagugcuguucgugcagguagugugauuaaccgaccuacugcugagcuagcacuucccgagcccccag

SEQ ID NO: 3186 - RNA, 69 nt, Macaca mulatta; identical to SEQ ID NO: 3168

SEQ ID NO: 3187 - RNA, 76 nt, Macaca mulatta
gcucccuucaacuuuaacauggaagugcuuucugugacuuuaaaauaaguaagugcuuccauguuuuaguaggagu

SEQ ID NO: 3188 - RNA, 68 nt, Macaca mulatta; identical to SEQ ID NO: 1666

SEQ ID NO: 3189 - RNA, 68 nt, Macaca mulatta
ccucuacuuuaacauggaggcacuugcugugguaugacaaaaauaagugcuuccauguuugagugugg

SEQ ID NO: 3190 - RNA, 67 nt, Macaca mulatta
gugauccucaaauguggagcacuauucugauguccaaguggaaagugcugcgacauuugagcgucac

SEQ ID NO: 3191 - RNA, 69 nt, Macaca mulatta
gggauacccaaaaugggagcacuuucccuuuugucugugcugggaagugcuucgauuuugggguguccc

SEQ ID NO: 3192 - RNA, 85 nt, Macaca mulatta
cucaggcugugacccucuagagggaagcgcuuucuguggucugaaagaaaagaaagugcuuccuuuuagaggguuaccguuugag

SEQ ID NO: 3193 - RNA, 80 nt, Macaca nemestrina; identical to SEQ ID NO: 3185

SEQ ID NO: 3194 - RNA, 80 nt, Gorilla gorilla
cugggggcuccaaagugcuguucgugcagguagugugauuacccgaccuacugcugagcuagcacuucccgagcccccgg

SEQ ID NO: 3195 - RNA, 80 nt, Pan paniscus; identical to SEQ ID NO: 3194

SEQ ID NO: 3196 - RNA, 80 nt, Pan troglodytes; identical to SEQ ID NO: 3194

SEQ ID NO: 3197 - RNA, 80 nt, Pongo pygmaeus; identical to SEQ ID NO: 3194

SEQ ID NO: 3198 - RNA, 57 nt, Canis familiaris
aaagugcuuacagugcagguagcauucugcgaucuacugcaaugcaagcacuucuua

SEQ ID NO: 3199 - RNA, 89 nt, Monodelphis domestica
agucuuggggggcuccaaagugcuguucgugcagguagugugauaaccugaccuacugcugagcuagcacuuccagagccccugggaca

SEQ ID NO: 3200 - RNA, 70 nt, Monodelphis domestica
cccacuacuuaaacguggauuuacuugcuuuguuucuaaaaaaguaagugcuuccauguuuuagugaugg

SEQ ID NO: 3201 - RNA, 71 nt, Monodelphis domestica
ccccuucuacuuuaacauggagguacuuucuguguuuaaaaagguaagugcuuccauguuuugguaggagu

SEQ ID NO: 3202 - RNA, 59 nt, Monodelphis domestica
gcuuuaacauggggguaccugcuacguaauaaaaaguaagugcuuccauguuucagugg

SEQ ID NO: 3203 - RNA, 71 nt, Monodelphis domestica
ccucugcuuuaacauggaagugcuugcugugauuuuaaaaaauuaagugcuuccauguuugaguuguggug

SEQ ID NO: 3204 - RNA, 69 nt, Gallus gallus
ccucaacuuuaacauggagguacuugcuggacaccugaaaaaguaagugcuuccauguuuuaguugugg

SEQ ID NO: 3205 - RNA, 68 nt, Xenopus laevis
agcacccaaaacggggcucucucuugugacugaauuaugaugagaaagugcuuucuguuuugggcguu

SEQ ID NO: 3206 - RNA, 71 nt, Xenopus laevis
cacgucggccuaacuggagcccugucucauugcagcugugaguaagugcucucuaguucgguugcugagug

SEQ ID NO: 3207 - RNA, 73 nt, Xenopus tropicalis
augggcuucaaagugcuguucgugcagguagcuuaauaacagaccuacugcaugggcggcacuucccaagccc

SEQ ID NO: 3208 - RNA, 69 nt, Xenopus tropicalis
ccccacuacuuuaacauugguguacuuucuaugucuuuaaaaaggguaagugcuccaauguuuuagugg

SEQ ID NO: 3209 - RNA, 71 nt, Xenopus tropicalis; identical to SEQ ID NO: 3206

SEQ ID NO: 3210 - RNA, 101 nt, Danio rerio
cugcuacuguugucacuaucggugcccucacaaaggcacugacuuggaugcugcaugugguaagugcuauuuguugggguaguuucaagugaccugugcua

SEQ ID NO: 3211 - RNA, 82 nt, Danio rerio
gucacuaucgguacccucacaaaggcacugacuuggaugcuguaauugguaagugcuauuuguugggguaguuucaagugac

SEQ ID NO: 3212 - RNA, 82 nt, Danio rerio; identical to SEQ ID NO: 3211

SEQ ID NO: 3213 - RNA, 77 nt, Danio rerio
cuaucgguacccucacaaaaacacugacuuugaugcuguauuugguaagugcuauuuguugggguaguuucaaguga

SEQ ID NO: 3214 - RNA, 132 nt, Danio rerio
ggacaagguuuuaaucugcuacuauugucacuaucgguacccucacaaaggcacugacuuggaugcuguaauugguaagugcuauuuguugggguaguuucaagugaccugugcuacaagagaauguugucu

SEQ ID NO: 3215 - RNA, 132 nt, Danio rerio; identical to SEQ ID NO: 3214

SEQ ID NO: 3216 - RNA, 132 nt, Danio rerio; identical to SEQ ID NO: 3214

SEQ ID NO: 3217 - RNA, 132 nt, Danio rerio; identical to SEQ ID NO: 3214

SEQ ID NO: 3218 - RNA, 132 nt, Danio rerio; identical to SEQ ID NO: 3214

SEQ ID NO: 3219 - RNA, 132 nt, Danio rerio; identical to SEQ ID NO: 3214

SEQ ID NO: 3220 - RNA, 132 nt, Danio rerio; identical to SEQ ID NO: 3214

SEQ ID NO: 3221 - RNA, 82 nt, Danio rerio
gucucuaucgguacccucacaaaagcacugacuuugaugcuguauuugguaagugcuauuuguugggguaguuucaagugac

SEQ ID NO: 3222 - RNA, 82 nt, Danio rerio; identical to SEQ ID NO: 3221

SEQ ID NO: 3223 - RNA, 82 nt, Danio rerio; identical to SEQ ID NO: 3221

SEQ ID NO: 3224 - RNA, 82 nt, Danio rerio; identical to SEQ ID NO: 3221

SEQ ID NO: 3225 - RNA, 82 nt, Danio rerio; identical to SEQ ID NO: 3221

SEQ ID NO: 3226 - RNA, 82 nt, Danio rerio; identical to SEQ ID NO: 3221

SEQ ID NO: 3227 - RNA, 94 nt, Danio rerio
caccauugucucuaucgguacccucacaaaagcacugacuuugaugcuguauuugguaagugcuauuuguugggguaguuuuaagugacaugug

SEQ ID NO: 3228 - RNA, 94 nt, Danio rerio; identical to SEQ ID NO: 3227

SEQ ID NO: 3229 - RNA, 132 nt, Danio rerio
ggacaagguuuuaaucugcugcuauugucacuaucgguacccucacaaaggcacugacuuggaugcuguaauugguaagugcuauuuguugggguaguuucaagugaccugugcuacaagagaauguugucu

SEQ ID NO: 3230 - RNA, 132 nt, Danio rerio; identical to SEQ ID NO: 3229

SEQ ID NO: 3231 - RNA, 130 nt, Danio rerio
gacaagauuuuagucugccaccauugucucuaucgguacccucacaaaagcacugacuuugaugcuguaauugguaagugcuauuuguugggguaguuucaagugaccugugcuacaagagaauguuguc

SEQ ID NO: 3232 - RNA, 108 nt, Danio rerio
uuuaaauaaacuauuaccgucaggcuuucacaagccagccucaaaguuuguucucaaacuuuaagaaucuaguugguaagugcuauuuguugggguaguuucaaguga

SEQ ID NO: 3233 - RNA, 91 nt, Danio rerio
auugauagaaaccaguugaggucaacucuaacuuuagcaucuuucuuuuaagcaaaguagaaagugcuaucaaguugggguagauguuugc

SEQ ID NO: 3234 - RNA, 81 nt, Danio rerio
caguugaggucaacucuaacuuuagcaucuuucuuuuaagcaaaguagaaagugcuaucaaguugggguagauguuugcug

SEQ ID NO: 3235 - RNA, 81 nt, Danio rerio; identical to SEQ ID NO: 3234

SEQ ID NO: 3236 - RNA, 81 nt, Danio rerio; identical to SEQ ID NO: 3234

SEQ ID NO: 3237 - RNA, 81 nt, Danio rerio
caguugacaucaacucuaacuuuagcaucuuucuuuuaagcaaaguaaaaagugcuaucaaguugggguagauguuugcug

SEQ ID NO: 3238 - RNA, 81 nt, Danio rerio
caguugacgucaacucuaacuuuagcaucuuucuuuuaagcagaguagaaagugcuaucaaguugggguagauguuugcug

SEQ ID NO: 3239 - RNA, 81 nt, Danio rerio; identical to SEQ ID NO: 3238

SEQ ID NO: 3240 - RNA, 81 nt, Danio rerio; identical to SEQ ID NO: 3238

SEQ ID NO: 3241 - RNA, 81 nt, Danio rerio; identical to SEQ ID NO: 3238

SEQ ID NO: 3242 - RNA, 81 nt, Danio rerio
caguugacaucaacucuaacuuuagcaucuuucuuuuaagcaaaguagaaagugcuaucaaguugggguagauguuugcug

SEQ ID NO: 3243 - RNA, 81 nt, Danio rerio; identical to SEQ ID NO: 3242

SEQ ID NO: 3244 - RNA, 81 nt, Danio rerio; identical to SEQ ID NO: 3242

SEQ ID NO: 3245 - RNA, 81 nt, Danio rerio; identical to SEQ ID NO: 3242

SEQ ID NO: 3246 - RNA, 81 nt, Danio rerio; identical to SEQ ID NO: 3242

SEQ ID NO: 3247 - RNA, 81 nt, Danio rerio; identical to SEQ ID NO: 3242

SEQ ID NO: 3248 - RNA, 81 nt, Danio rerio; identical to SEQ ID NO: 3242

SEQ ID NO: 3249 - RNA, 81 nt, Danio rerio; identical to SEQ ID NO: 3242

SEQ ID NO: 3250 - RNA, 81 nt, Danio rerio; identical to SEQ ID NO: 3242

SEQ ID NO: 3251 - RNA, 81 nt, Danio rerio
caguugacaucaacucuaacuuuagcaucuuucuuuuaagcagagcagaaagugcuaucaaguugggguagauguuugcug

SEQ ID NO: 3252 - RNA, 81 nt, Danio rerio
caguugaggucaacucuaacuuuagcaucuuucuuuuaagcauaguagaaagugcuaucaaguugggguagauguuuacug

SEQ ID NO: 3253 - RNA, 81 nt, Danio rerio; identical to SEQ ID NO: 3252

SEQ ID NO: 3254 - RNA, 81 nt, Danio rerio
caguugaggucaacucuaacuuuagcaucuuucuuuuaagcaaaguagaaagugcuaucaaguugggguagauguuuguug

SEQ ID NO: 3255 - RNA, 81 nt, Danio rerio; identical to SEQ ID NO: 3254

SEQ ID NO: 3256 - RNA, 96 nt, Danio rerio
uucaaucuaaagcacauuaagaucacuucaaacaggagcauugauuuguccuuuguucauaagugcuucucuuugggguaguuuuaauaaggacag

SEQ ID NO: 3257 - RNA, 79 nt, Danio rerio
cacauuaagaucacuucaaacaggagcauugauuuguccuuuguucauaagugcuucucuuugggguaguuuuaauaag

SEQ ID NO: 3258 - RNA, 79 nt, Danio rerio; identical to SEQ ID NO: 3257

SEQ ID NO: 3259 - RNA, 79 nt, Danio rerio; identical to SEQ ID NO: 3257

SEQ ID NO: 3260 - RNA, 79 nt, Danio rerio; identical to SEQ ID NO: 3257

SEQ ID NO: 3261 - RNA, 82 nt, Danio rerio
auuaagaucacuacaaacaggagcauugauuuguccuuuguucauaagugcuucucuuugggguaguuuuaauaaggacaag

SEQ ID NO: 3262 - RNA, 73 nt, Danio rerio
auuaagaucacuucaaacaggagcauugauuuguccuuuguucauaagugcuucucuuugggguaguuuuaau

SEQ ID NO: 3263 - RNA, 82 nt, Danio rerio
auuaagaucacuucaaacaggagcauugauuuguccuuuguucauaagugcuucucuuugggguaguuuuaauaaggacaag

SEQ ID NO: 3264 - RNA, 82 nt, Danio rerio; identical to SEQ ID NO: 3263

SEQ ID NO: 3265 - RNA, 82 nt, Danio rerio; identical to SEQ ID NO: 3263

SEQ ID NO: 3266 - RNA, 82 nt, Danio rerio; identical to SEQ ID NO: 3263

SEQ ID NO: 3267 - RNA, 82 nt, Danio rerio; identical to SEQ ID NO: 3263

SEQ ID NO: 3268 - RNA, 82 nt, Danio rerio; identical to SEQ ID NO: 3263

SEQ ID NO: 3269 - RNA, 82 nt, Danio rerio; identical to SEQ ID NO: 3263

SEQ ID NO: 3270 - RNA, 82 nt, Danio rerio; identical to SEQ ID NO: 3263

SEQ ID NO: 3271 - RNA, 82 nt, Danio rerio; identical to SEQ ID NO: 3263

SEQ ID NO: 3272 - RNA, 82 nt, Danio rerio; identical to SEQ ID NO: 3263

SEQ ID NO: 3273 - RNA, 82 nt, Danio rerio; identical to SEQ ID NO: 3263

SEQ ID NO: 3274 - RNA, 82 nt, Danio rerio; identical to SEQ ID NO: 3263

SEQ ID NO: 3275 - RNA, 82 nt, Danio rerio; identical to SEQ ID NO: 3263

SEQ ID NO: 3276 - RNA, 82 nt, Danio rerio; identical to SEQ ID NO: 3263

SEQ ID NO: 3277 - RNA, 82 nt, Danio rerio
gucucuaucgguacccucacaaaagcacugacuuugaugcuguauuugguaagugcuauuuguuggcguaguuucaagugac

SEQ ID NO: 3278 - RNA, 82 nt, Danio rerio; identical to SEQ ID NO: 3277

SEQ ID NO: 3279 - RNA, 82 nt, Danio rerio; identical to SEQ ID NO: 3277

SEQ ID NO: 3280 - RNA, 81 nt, Danio rerio
caguugagaucaacucuaacuuuagcaucuuucuuuuaagcaaaguagaaagugcuaucaaauugggguagauguuugcug

SEQ ID NO: 3281 - RNA, 68 nt, Mus musculus
ccucugcuuuaacaugggguuaccugcuguguuaaacaaaagcaagugcuuccauguuucaguggggg

SEQ ID NO: 3282 - RNA, 67 nt, Gallus gallus
ccacaacuuaaauguggaugugcuugcuuuguucugaaaagaaagugcuuccauguuuuagugaugg

SEQ ID NO: 3283 - RNA, 90 nt, Homo sapiens
ucccaugcugugacccucuagaggaagcacuuucuguuuguugucugagaaaaaacaaagugcuucccuuuagaguguuaccguuuggga

SEQ ID NO: 3284 - RNA, 87 nt, Macaca mulatta; identical to SEQ ID NO: 2145

SEQ ID NO: 3285 - RNA, 84 nt, Homo sapiens
uguagagauaggaucucacuuuguugcccaggcuggucucaaacuccuggucugggcaacaaagugagaccuuaucucuacaag

SEQ ID NO: 3286 - RNA, 88 nt, Homo sapiens
uuugggaggccgaggcuggugcaucacuugagcccagcaauuugagaccaaucugggcaacaaagugagaccuccgucucuacaaaga

SEQ ID NO: 3287 - RNA, 84 nt, Homo sapiens
acgucagggaaaggauucugcugucggucccacuccaaaguucacagaauggguggugggcacagaaucuggacucugcuugug

SEQ ID NO: 3288 - RNA, 80 nt, Homo sapiens; identical to SEQ ID NO: 2217

SEQ ID NO: 3289 - RNA, 72 nt, Homo sapiens; identical to SEQ ID NO: 2263

SEQ ID NO: 3290 - RNA, 74 nt, Homo sapiens; identical to SEQ ID NO: 2219

SEQ ID NO: 3291 - RNA, 83 nt, Homo sapiens
cggggugagguaguagguugugugguuucagggcagugauguugccccucggaagauaacuauacaaccuacugccuucccug

SEQ ID NO: 3292 - RNA, 84 nt, Homo sapiens; identical to SEQ ID NO: 2221

SEQ ID NO: 3293 - RNA, 87 nt, Homo sapiens; identical to SEQ ID NO: 2222

SEQ ID NO: 3294 - RNA, 87 nt, Homo sapiens; identical to SEQ ID NO: 2224

SEQ ID NO: 3295 - RNA, 83 nt, Homo sapiens; identical to SEQ ID NO: 2205

SEQ ID NO: 3296 - RNA, 84 nt, Homo sapiens; identical to SEQ ID NO: 2226

SEQ ID NO: 3297 - RNA, 84 nt, Homo sapiens; identical to SEQ ID NO: 2242

SEQ ID NO: 3298 - RNA, 119 nt, Homo sapiens
aggauucugcucaugccagggugagguaguaaguuguauuguugugggguagggauauuaggccccaauuagaagauaacuauacaacuuacuacuuucccugguguguggcauauuca

SEQ ID NO: 3299 - RNA, 108 nt, Mus musculus
cugcacaugcuggggugagguaguaaguuguauuguugugggguagggauuuuaggccccaguaagaagauaacuauacaacuuacuacuuuccuugguguguggcau

SEQ ID NO: 3300 - RNA, 108 nt, Rattus norvegicus
cugcacaugcuggggugagguaguaaguuguauuguugugggguagggauuuuaggccccaauaagaagauaacuauacaacuuacuacuuucccugguguguggcau

SEQ ID NO: 3301 - RNA, 80 nt, Ateles geoffroyi
gugagguaguaaguuguauuguugugggguagggauauuaggccccaauuagaagauaacuauacaacuuacuacuuucc

SEQ ID NO: 3302 - RNA, 80 nt, Macaca mulatta; identical to SEQ ID NO: 3301

SEQ ID NO: 3303 - RNA, 80 nt, Gorilla gorilla; identical to SEQ ID NO: 3301

SEQ ID NO: 3304 - RNA, 80 nt, Pan paniscus; identical to SEQ ID NO: 3301

SEQ ID NO: 3305 - RNA, 119 nt, Pan troglodytes; identical to SEQ ID NO: 3298

SEQ ID NO: 3306 - RNA, 80 nt, Pongo pygmaeus; identical to SEQ ID NO: 3301

SEQ ID NO: 3307 - RNA, 80 nt, Canis familiaris
ugagguaguaaguuguauuguugugggguagggauuuuaggccccaauuagaagauaacuauacaacuuacuacuuuccc

SEQ ID NO: 3308 - RNA, 108 nt, Xenopus tropicalis
ucugcccucuucaggaugagguaguaaguuguauuguuguggggguuuuuauuuccccaaauuaggagauaacuauacagcuuacugccuucccugcagcaugguaau

SEQ ID NO: 3309 - RNA, 119 nt, Bos taurus
aggacucugcucaugcuggggugagguaguaaguuguauuguugugggguagggauuuuaggccccaauuugaagauaacuauacaacuuacuacuuucccugguguguagcacauuca

SEQ ID NO: 3310 - RNA, 73 nt, Homo sapiens; identical to SEQ ID NO: 2386

SEQ ID NO: 3311 - RNA, 89 nt, Homo sapiens
ugcugcuggccagagcucuuuucacauugugcuacugucugcaccugucacuagcagugcaauguuaaaagggcauuggccguguagug

SEQ ID NO: 3312 - RNA, 78 nt, Homo sapiens; identical to SEQ ID NO: 2425

SEQ ID NO: 3313 - RNA, 88 nt, Homo sapiens
aacugcccucaaggagcuuacaaucuagcuggggguaaaugacuugcacaugaacacaacuagacugugagcuucuagagggcaggga

SEQ ID NO: 3314 - RNA, 109 nt, Mus musculus
cuguguuugaaauggggacugcccucaaggagcuuacaaucuagcuggggguagaugacuugcacuugaacacaacuagacugugagcuucuagagggcaggggccuua

SEQ ID NO: 3315 - RNA, 88 nt, Rattus norvegicus
gacugcccucaaggagcuuacaaucuagcuggggguagaugacuugcacuugaacacaacuagacugugagcuucuagagggcagggg

SEQ ID NO: 3316 - RNA, 69 nt, Canis familiaris
aaggagcuuacaaucuagcugggggugaacggcuugcacaugaacgcaacuagacugugagcuucuaga

SEQ ID NO: 3317 - RNA, 69 nt, Homo sapiens; identical to SEQ ID NO: 2479

SEQ ID NO: 3318 - RNA, 86 nt, Homo sapiens
cacccagaucagugcuuggcaccuagcaagcacucaguaaauauuuguugagugccugcuaugugccaggcauugugcugagggcu

SEQ ID NO: 3319 - RNA, 94 nt, Ateles geoffroyi
gugcuguguguagugcuucacuucaauuagugccauucauguggcuagaaauuuguuuggcacuuuuuagagugaaauaaugcacaacagguac

SEQ ID NO: 3320 - RNA, 58 nt, Canis familiaris
cuuggcaccuaguaagcacucaguaaauacuuguugagugccugcuaugugccaggca

SEQ ID NO: 3321 - RNA, 81 nt, Homo sapiens
cccauuggcauaaacccguagauccgaucuuguggugaaguggaccgcacaagcucgcuucuaugggucugugucagugug

SEQ ID NO: 3322 - RNA, 70 nt, Homo sapiens
ggcacccacccguagaaccgaccuugcggggccuucgccgcacacaagcucgugucuguggguccguguc

SEQ ID NO: 3323 - RNA, 65 nt, Mus musculus
cauaaacccguagauccgaucuuguggugaaguggaccgcgcaagcucguuucuaugggucugug

SEQ ID NO: 3324 - RNA, 70 nt, Mus musculus; identical to SEQ ID NO: 3322

SEQ ID NO: 3325 - RNA, 81 nt, Rattus norvegicus
cccauuggcauaaacccguagauccgaucuuguggugaaguggaccgcacaagcucguuucuaugggucuguggcagugug

SEQ ID NO: 3326 - RNA, 70 nt, Rattus norvegicus; identical to SEQ ID NO: 3322

SEQ ID NO: 3327 - RNA, 81 nt, Lagothrix lagotricha; identical to SEQ ID NO: 3321

SEQ ID NO: 3328 - RNA, 81 nt, Macaca mulatta; identical to SEQ ID NO: 3321

SEQ ID NO: 3329 - RNA, 70 nt, Macaca mulatta; identical to SEQ ID NO: 3322

SEQ ID NO: 3330 - RNA, 81 nt, Macaca nemestrina; identical to SEQ ID NO: 3321

SEQ ID NO: 3331 - RNA, 81 nt, Gorilla gorilla; identical to SEQ ID NO: 3321

SEQ ID NO: 3332 - RNA, 81 nt, Pan paniscus; identical to SEQ ID NO: 3321

SEQ ID NO: 3333 - RNA, 81 nt, Pan troglodytes; identical to SEQ ID NO: 3321

SEQ ID NO: 3334 - RNA, 81 nt, Pongo pygmaeus
cccauuggcauaaacccguagauccgaucuugugguaaaguggaccgcacaagcucgcuucuaugggucugugucagugug

SEQ ID NO: 3335 - RNA, 59 nt, Canis familiaris
aacccguagauccgaucuuguggugaaguggacggcacaagcucgcuucuaugggucug

SEQ ID NO: 3336 - RNA, 57 nt, Canis familiaris
aacccguagauccgaucuuguggugauaguccacacaagcuugugucuauagguaug

SEQ ID NO: 3337 - RNA, 60 nt, Canis familiaris
cacccguagaaccgaccuugcggggccuucgccgcacacaagcucgagucugugggucug

SEQ ID NO: 3338 - RNA, 81 nt, Gallus gallus
ccaauuggcauaaacccguagauccgaucuuguguugaaaugcacugcacaagcucgcuucuaugggucugugucaguaug

SEQ ID NO: 3339 - RNA, 71 nt, Xenopus tropicalis
uaacauaaacccguagauccgaucuuguggugaauuccuuugcucaagcucguuucuaugggucuguguca

SEQ ID NO: 3340 - RNA, 81 nt, Bos taurus; identical to SEQ ID NO: 3321

SEQ ID NO: 3341 - RNA, 70 nt, Bos taurus; identical to SEQ ID NO: 3322

SEQ ID NO: 3342 - RNA, 70 nt, Sus scrofa; identical to SEQ ID NO: 3322

SEQ ID NO: 3343 - RNA, 84 nt, Danio rerio
gccacuugucauuaacccguagauccgaucuugugauaaguuugauggcacaagcucgauucuaugggucucugucucuguggu

SEQ ID NO: 3344 - RNA, 80 nt, Danio rerio
cacuugucacaaacccguagauccgaucuuguggcguaaucggcaacccaagcucgauucugugggucucugucacugug

SEQ ID NO: 3345 - RNA, 82 nt, Homo sapiens; identical to SEQ ID NO: 2557

SEQ ID NO: 3346 - RNA, 84 nt, Homo sapiens; identical to SEQ ID NO: 1640

SEQ ID NO: 3347 - RNA, 91 nt, Danio rerio
ggaacggaguggaauuugaaacguuuuggccaaaaauguagccauggcaaagggguuuuuugcagaaacguuucagauuucgcuccguucu

SEQ ID NO: 3348 - RNA, 90 nt, Homo sapiens; identical to SEQ ID NO: 2613

SEQ ID NO: 3349 - RNA, 100 nt, Homo sapiens; identical to SEQ ID NO: 2614

SEQ ID NO: 3350 - RNA, 110 nt, Homo sapiens; identical to SEQ ID NO: 2687

SEQ ID NO: 3351 - RNA, 89 nt, Homo sapiens
cugauggcugcacucaacauucauugcugucgguggguuugagucugaaucaacucacugaucaaugaaugcaaacugcggaccaaaca

SEQ ID NO: 3352 - RNA, 110 nt, Homo sapiens; identical to SEQ ID NO: 2701

SEQ ID NO: 3353 - RNA, 137 nt, Homo sapiens
guccccuccccuaggccacagccgaggucacaaucaacauucauuguugucgguggguugugaggacugaggccagacccaccgggggaugaaugucacuguggcugggccagacacggcuuaaggggaauggggac

SEQ ID NO: 3354 - RNA, 95 nt, Homo sapiens
ccagcucgggcagccguggccaucuuacugggcagcauuggauggagucaggucucuaauacugccugguaaugaugacggcggagcccugcacg

SEQ ID NO: 3355 - RNA, 97 nt, Homo sapiens
uuagguaauuccuccacucaaaacccuucagugacuuccaugacaugaaauaggaagucauuggaggguuugagcagaggaaugaccuguuuuaaaa

SEQ ID NO: 3356 - RNA, 72 nt, Homo sapiens; identical to SEQ ID NO: 2868

SEQ ID NO: 3357 - RNA, 100 nt, Homo sapiens; identical to SEQ ID NO: 2874

SEQ ID NO: 3358 - RNA, 98 nt, Macaca mulatta
uccagggagguauuaaguuggugcaaaaguaauugugguuuuuugccauuaaaaguaaugacaauacuggcaauuacuuuuccuccaaaccugauauu

SEQ ID NO: 3359 - RNA, 85 nt, Homo sapiens
ucucaagcugugacugcaaagggaagcccuuucuguugucugaaagaagagaaagcgcuucccuuugcuggauuacgguuugaga

SEQ ID NO: 3360 - RNA, 87 nt, Homo sapiens
ucucaagcugugggucugcaaagggaagcccuuucuguugucuaaaagaagagaaagcgcuucccuuugcuggauuacgguuugaga

SEQ ID NO: 3361 - RNA, 83 nt, Homo sapiens
ucaugcuguggcccuccagagggaagcgcuuucuguugucugaaagaaaacaaagcgcuccccuuuagagguuuacgguuuga

SEQ ID NO: 3362 - RNA, 87 nt, Homo sapiens
ucccaugcugugacccucuagagggaagcacuuucuguugucugaaagaaaccaaagcgcuucccuuuggagcguuacgguuugaga

SEQ ID NO: 3363 - RNA, 87 nt, Homo sapiens
ucucaugcugugacccucuagagggaagcacuuucucuugucuaaaagaaaagaaagcgcuucucuuuagaggauuacucuuugaga

SEQ ID NO: 3364 - RNA, 87 nt, Macaca mulatta
ucucaugcugugacccuacaaagggaagcccuuucuguugucuaaacgaaaagaaagugcuucucuuugcuggguuacgguuugaga

SEQ ID NO: 3365 - RNA, 87 nt, Macaca mulatta; identical to SEQ ID NO: 3364

SEQ ID NO: 3366 - RNA, 97 nt, Macaca mulatta
auaaaauuuccaguuggaaccuaaugauucaucagacucagauauuuaaguuaacaguauuugagucugaugaaucauuagguuccagucagaaauu

SEQ ID NO: 3367 - RNA, 95 nt, Homo sapiens
cggccggcccuggguccaucuuccaguacaguguuggauggucuaauugugaagcuccuaacacugucugguaaagauggcucccggguggguuc

SEQ ID NO: 3368 - RNA, 72 nt, Mus musculus
ggguccaucuuccagugcaguguuggaugguugaaguaugaagcuccuaacacugucugguaaagauggccc

SEQ ID NO: 3369 - RNA, 94 nt, Rattus norvegicus
ggcugacucugaguccaucuuccagugcaguguuggaugguugaaguacgaagcuccuaacacugucugguaaagauggcccccgggucaguuc

SEQ ID NO: 3370 - RNA, 64 nt, Monodelphis domestica
uggggccaucuuccaguacagugguggauggugaagcuucuaacacugucugguaaagaugccc

SEQ ID NO: 3371 - RNA, 83 nt, Danio rerio
gucucuaggguacaucuuaccugacagugcuuggcuguucacugauguucuaacacugucugguaacgaugcacucuggugac

SEQ ID NO: 3372 - RNA, 21 nt, Homo sapiens
uagcaccaucugaaaucgguu

SEQ ID NO: 3373 - RNA, 23 nt, Homo sapiens
uagcaccauuugaaaucaguguu

SEQ ID NO: 3374 - RNA, 22 nt, Homo sapiens
uguaaacauccucgacuggaag

SEQ ID NO: 3375 - RNA, 22 nt, Homo sapiens
uguaaacauccuacacucagcu

SEQ ID NO: 3376 - RNA, 20 nt, Homo sapiens
ucaaaugcucagacuccugu

SEQ ID NO: 3377 - RNA, 22 nt, Homo sapiens
uuaaggcacgcggugaaugcca

SEQ ID NO: 3378 - RNA, 22 nt, Homo sapiens
ucacagugaaccggucucuuuu

SEQ ID NO: 3379 - RNA, 22 nt, Homo sapiens
ucucccaacccuuguaccagug

SEQ ID NO: 3380 - RNA, 22 nt, Homo sapiens
uagguuauccguguugccuucg

SEQ ID NO: 3381 - RNA, 22 nt, Homo sapiens
uaugugggaugguaaaccgcuu

SEQ ID NO: 3382 - RNA, 22 nt, Homo sapiens
ugguugaccauagaacaugcgc

SEQ ID NO: 3383 - RNA, 22 nt, Homo sapiens
agaucagaaggugauuguggcu

SEQ ID NO: 3384 - RNA, 21 nt, Homo sapiens
uaguagaccguauagcguacg

SEQ ID NO: 3385 - RNA, 22 nt, Homo sapiens
agcucggucugaggccccucag

SEQ ID NO: 3386 - RNA, 22 nt, Homo sapiens
aucaugaugggcuccucggugu

SEQ ID NO: 3387 - RNA, 25 nt, Homo sapiens
uagugcaauauugcuuauaggguuu

SEQ ID NO: 3388 - RNA, 22 nt, Homo sapiens
aauccuuugucccugggugaga

SEQ ID NO: 3389 - RNA, 21 nt, Homo sapiens
agacccuggucugcacucuau

SEQ ID NO: 3390 - RNA, 21 nt, Homo sapiens
uaaggcacccuucugaguaga

SEQ ID NO: 3391 - RNA, 21 nt, Homo sapiens
uuuugcaccuuuuggagugaa

SEQ ID NO: 3392 - RNA, 23 nt, Homo sapiens
ugauuguagccuuuuggaguaga

SEQ ID NO: 3393 - RNA, 21 nt, Homo sapiens
gugucuuuugcucugcaguca

SEQ ID NO: 3394 - RNA, 22 nt, Homo sapiens
aagugcugucauagcugagguc

SEQ ID NO: 3395 - RNA, 21 nt, Homo sapiens
cugcaaagggaagcccuuucu

SEQ ID NO: 3396 - RNA, 20 nt, Homo sapiens
aaaguagcuguaccauuugc

SEQ ID NO: 3397 - RNA, 23 nt, Homo sapiens
aguauguucuuccaggacagaac

SEQ ID NO: 3398 - RNA, 24 nt, Homo sapiens
ucagaacaaaugccgguucccaga

SEQ ID NO: 3399 - RNA, 22 nt, Homo sapiens
ugugucacucgaugaccacugu

SEQ ID NO: 3400 - RNA, 23 nt, Homo sapiens
uaaaucccauggugccuucuccu

SEQ ID NO: 3401 - RNA, 24 nt, Homo sapiens
gaccuggacauguuugugcccagu

SEQ ID NO: 3402 - RNA, 22 nt, Homo sapiens
guucucccaacguaagcccagc

SEQ ID NO: 3403 - RNA, 21 nt, Homo sapiens
augauccaggaaccugccucu

SEQ ID NO: 3404 - RNA, 23 nt, Homo sapiens
ugcaccaugguugucugagcaug

SEQ ID NO: 3405 - RNA, 23 nt, Homo sapiens
uccaguaccacgugucagggcca

SEQ ID NO: 3406 - RNA, 23 nt, Homo sapiens
caguaacaaagauucauccuugu

SEQ ID NO: 3407 - RNA, 22 nt, Xenopus tropicalis
uagcagcacguaaauacuggag

SEQ ID NO: 3408 - RNA, 22 nt, Mus musculus
acugcagugagggcacuuguag

SEQ ID NO: 3409 - RNA, 22 nt, Canis familiaris
acugcagugaaggcacuuguag

SEQ ID NO: 3410 - RNA, 22 nt, Danio rerio
acugcaguggaggcacuucuag

SEQ ID NO: 3411 - RNA, 23 nt, Xenopus laevis
uaaggugcaucuagugcaguuag

SEQ ID NO: 3412 - RNA, 23 nt, Mus musculus
uaaagugcuuauagugcagguag

SEQ ID NO: 3413 - RNA, 21 nt, Rattus norvegicus
caaagugcucauagugcaggu

SEQ ID NO: 3414 - RNA, 22 nt, Xenopus tropicalis
uggcucaguucagcaggaacag

SEQ ID NO: 3415 - RNA, 22 nt, Mus musculus
uucaaguaauccaggauaggcu

SEQ ID NO: 3416 - RNA, 22 nt, Mus musculus
cuuucagucggauguuugcagc

SEQ ID NO: 3417 - RNA, 22 nt, Mus musculus
cuuucagucggauguuuacagc

SEQ ID NO: 3418 - RNA, 22 nt, Rattus norvegicus
cuuucagucggauguuugcagc

SEQ ID NO: 3419 - RNA, 23 nt, Mus musculus
aggcaguguaguuagcugauugc

SEQ ID NO: 3420 - RNA, 22 nt, Mus musculus
ucagugcacuacagaacuuugu

SEQ ID NO: 3421 - RNA, 22 nt, Rattus norvegicus
ucagugcaucacagaacuuugu

SEQ ID NO: 3422 - RNA, 21 nt, Mus musculus
ugauauguuugauauuggguu

SEQ ID NO: 3423 - RNA, 23 nt, Mus musculus
cccaguguucagacuaccuguuc

SEQ ID NO: 3424 - RNA, 23 nt, Mus musculus
cccaguguuuagacuaccuguuc

SEQ ID NO: 3425 - RNA, 23 nt, Rattus norvegicus
cccaguguucagacuaccuguuc

SEQ ID NO: 3426 - RNA, 23 nt, Macaca mulatta
cccaguguucagacuaccuguuc

SEQ ID NO: 3427 - RNA, 23 nt, Gallus gallus
cccaguguucagacuaccuguuc

SEQ ID NO: 3428 - RNA, 22 nt, Bos taurus
cccaguguucagacuaccuguu

SEQ ID NO: 3429 - RNA, 22 nt, Mus musculus
auaagacgagcaaaaagcuugu

SEQ ID NO: 3430 - RNA, 22 nt, Danio rerio
uugugcuugaucuaaccaugug

SEQ ID NO: 3431 - RNA, 22 nt, Mus musculus
ugguuuaccgucccacauacau

SEQ ID NO: 3432 - RNA, 22 nt, Rattus norvegicus
ugguuuaccgucccacauacau

SEQ ID NO: 3433 - RNA, 23 nt, Mus musculus
ccuaguaggugcucaguaagugu

SEQ ID NO: 3434 - RNA, 23 nt, Rattus norvegicus
ccuaguaggugcucaguaagugu

SEQ ID NO: 3435 - RNA, 22 nt, Mus musculus
uccagcaucagugauuuuguug

SEQ ID NO: 3436 - RNA, 22 nt, Macaca mulatta
uccagcaucagugauuuuguug

SEQ ID NO: 3437 - RNA, 23 nt, Mus musculus
aaugacacgaucacucccguuga

SEQ ID NO: 3438 - RNA, 23 nt, Rattus norvegicus
aaugacacgaucacucccguuga

SEQ ID NO: 3439 - RNA, 23 nt, Macaca mulatta
aaugacacgaucacucccguuga

SEQ ID NO: 3440 - RNA, 23 nt, Canis familiaris
aaugacacgaucacucccguuga

SEQ ID NO: 3441 - RNA, 22 nt, Mus musculus
agaggcuggccgugaugaauuc

SEQ ID NO: 3442 - RNA, 22 nt, Rattus norvegicus
agaggcuggccgugaugaauuc

SEQ ID NO: 3443 - RNA, 23 nt, Canis familiaris
agaggcuggccgugaugaauucg

SEQ ID NO: 3444 - RNA, 22 nt, Macaca mulatta
uccuguacugagcugccccgag

SEQ ID NO: 3445 - RNA, 21 nt, Mus musculus
cccagauaauagcacucucaa

SEQ ID NO: 3446 - RNA, 22 nt, Macaca mulatta
aaagugcuucccuuuggacugu

SEQ ID NO: 3447 - RNA, 22 nt, Macaca mulatta
aaagugcuucucuuugcugggu

SEQ ID NO: 3448 - RNA, 24 nt, Macaca mulatta
acaaagugcuucccuucagagugu

SEQ ID NO: 3449 - RNA, 21 nt, Macaca mulatta
aggaggcagcgcucucaggac

SEQ ID NO: 3450 - RNA, 22 nt, Macaca mulatta
uggugggccgcagaacaugugc

SEQ ID NO: 3451 - RNA, 22 nt, Mus musculus
uggugcggaaagggcccacagu

SEQ ID NO: 3452 - RNA, 21 nt, Danio rerio
uguaacagcaacuccaugugg

SEQ ID NO: 3453 - RNA, 22 nt, Mus musculus
ugagguaguaguuuguacaguu

SEQ ID NO: 3454 - RNA, 21 nt, Xenopus tropicalis
uggaauguaaagaaguaugua

SEQ ID NO: 3455 - RNA, 23 nt, Xenopus tropicalis
ucuuugguuaucuagcuguauga

SEQ ID NO: 3456 - RNA, 23 nt, Sus scrofa
ucuuugguuaucuagcuguauga

SEQ ID NO: 3457 - RNA, 23 nt, Sus scrofa
ucuuugguuaucuagcuguauga

SEQ ID NO: 3458 - RNA, 21 nt, Mus musculus
aucacauugccagggauuucc

SEQ ID NO: 3459 - RNA, 21 nt, Mus musculus
uucacaguggcuaaguuccgc

SEQ ID NO: 3460 - RNA, 19 nt, Xenopus tropicalis
ggcaagaugcuggcaagcu

SEQ ID NO: 3461 - RNA, 21 nt, Mus musculus
gugcauuguaguugcauugca

SEQ ID NO: 3462 - RNA, 21 nt, Mus musculus
uaaagugcugacagugcagau

SEQ ID NO: 3463 - RNA, 21 nt, Mus musculus
cauuauuacuuuugguacgcg

SEQ ID NO: 3464 - RNA, 21 nt, Canis familiaris
cauuauuacuuuugguacgcg

SEQ ID NO: 3465 - RNA, 21 nt, Mus musculus
ucacagugaaccggucucuuu

SEQ ID NO: 3466 - RNA, 21 nt, Mus musculus
cuuuuugcggucugggcuugc

SEQ ID NO: 3467 - RNA, 21 nt, Macaca mulatta
cuuuuugcggucugggcuugc

SEQ ID NO: 3468 - RNA, 22 nt, Xenopus tropicalis
uugguccccuucaaccagcugc

SEQ ID NO: 3469 - RNA, 23 nt, Mus musculus
uauggcuuuuuauuccuauguga

SEQ ID NO: 3470 - RNA, 20 nt, Bos taurus
cauaaaguagaaagcacuac

SEQ ID NO: 3471 - RNA, 21 nt, Danio rerio
cauaaaguagaaagcacuacu

SEQ ID NO: 3472 - RNA, 22 nt, Macaca mulatta
ugagaacugaauuccauaggcu

SEQ ID NO: 3473 - RNA, 22 nt, Xenopus tropicalis
ugagaacugaauuccauagguu

SEQ ID NO: 3474 - RNA, 23 nt, Mus musculus
aacauucauugcugucggugggu

SEQ ID NO: 3475 - RNA, 21 nt, Fugu rubripes
ugguucuagacuugccaacua

SEQ ID NO: 3476 - RNA, 21 nt, Tetraodon nigroviridis
ugguucuagacuugccaacua

SEQ ID NO: 3477 - RNA, 22 nt, Mus musculus
caucuuacugggcagcauugga

SEQ ID NO: 3478 - RNA, 22 nt, Mus musculus
uaaucucagcuggcaacuguga

SEQ ID NO: 3479 - RNA, 24 nt, Monodelphis domestica
agcuacaucuggcuacugggucuc

SEQ ID NO: 3480 - RNA, 21 nt, Mus musculus
agggcccccccucaauccugu

SEQ ID NO: 3481 - RNA, 21 nt, Rattus norvegicus
agggcccccccucaauccugu

SEQ ID NO: 3482 - RNA, 21 nt, Macaca mulatta
agggcccccccucaauccugu

SEQ ID NO: 3483 - RNA, 22 nt, Mus musculus
gcuuuaacaugggguuaccugc

SEQ ID NO: 3484 - RNA, 24 nt, Mus musculus
aauccuuggaaccuaggugugaau

SEQ ID NO: 3485 - RNA, 24 nt, Macaca mulatta
aauccuuggaaccuaggugugagu

SEQ ID NO: 3486 - RNA, 21 nt, Canis familiaris
uuauaauacaaccugauaagu

SEQ ID NO: 3487 - RNA, 21 nt, Mus musculus
aucauagaggaacauccacuu

SEQ ID NO: 3488 - RNA, 22 nt, Mus musculus
cuccugacuccagguccugugu

SEQ ID NO: 3489 - RNA, 22 nt, Rattus norvegicus
cuccugacuccagguccugugu

SEQ ID NO: 3490 - RNA, 22 nt, Mus musculus
uaauacugccugguaaugauga

SEQ ID NO: 3491 - RNA, 22 nt, Rattus norvegicus
uuuuugcgauguguuccuaaug

SEQ ID NO: 3492 - RNA, 22 nt, Canis familiaris
aaucguacagggucauccacuu

SEQ ID NO: 3493 - RNA, 22 nt, Macaca mulatta
aucgugcauccuuuuagagugu

SEQ ID NO: 3494 - RNA, 21 nt, Macaca mulatta
caaagcgcuccccuuuagagg

SEQ ID NO: 3495 - RNA, 22 nt, Canis familiaris
ugugacagauugauaacugaaa

SEQ ID NO: 3496 - RNA, 23 nt, Monodelphis domestica
uguaguguuuccuacuuuaugga

SEQ ID NO: 3497 - RNA, 23 nt, Danio rerio
uguaguguuuccuacuuuaugga

SEQ ID NO: 3498 - RNA, 22 nt, Macaca mulatta
uuaucagaaucuccagggguac

SEQ ID NO: 3499 - RNA, 22 nt, Mus musculus
uagcaccaucugaaaucgguua

SEQ ID NO: 3500 - RNA, 23 nt, Mus musculus
uagcaccauuugaaaucaguguu

SEQ ID NO: 3501 - RNA, 22 nt, Mus musculus
uagcaccauuugaaaucgguua

SEQ ID NO: 3502 - RNA, 22 nt, Rattus norvegicus
uagcaccaucugaaaucgguua

SEQ ID NO: 3503 - RNA, 23 nt, Rattus norvegicus
uagcaccauuugaaaucaguguu

SEQ ID NO: 3504 - RNA, 22 nt, Rattus norvegicus
uagcaccauuugaaaucgguua

SEQ ID NO: 3505 - RNA, 20 nt, Ateles geoffroyi
uagcaccauuugaaaucagu

SEQ ID NO: 3506 - RNA, 20 nt, Lagothrix lagotricha
uagcaccauuugaaaucagu

SEQ ID NO: 3507 - RNA, 20 nt, Saguinus labiatus
uagcaccauuugaaaucagu

SEQ ID NO: 3508 - RNA, 23 nt, Macaca mulatta
uagcaccauuugaaaucaguguu

SEQ ID NO: 3509 - RNA, 22 nt, Macaca mulatta
uagcaccauuugaaaucgguua

SEQ ID NO: 3510 - RNA, 20 nt, Macaca nemestrina
uagcaccauuugaaaucagu

SEQ ID NO: 3511 - RNA, 20 nt, Gorilla gorilla
uagcaccauuugaaaucagu

SEQ ID NO: 3512 - RNA, 20 nt, Pan paniscus
uagcaccauuugaaaucagu

SEQ ID NO: 3513 - RNA, 20 nt, Pan troglodytes
uagcaccauuugaaaucagu

SEQ ID NO: 3514 - RNA, 20 nt, Pongo pygmaeus
uagcaccauuugaaaucagu

SEQ ID NO: 3515 - RNA, 22 nt, Canis familiaris
uagcaccaucugaaaucgguua

SEQ ID NO: 3516 - RNA, 23 nt, Canis familiaris
uagcaccauuugaaaucaguguu

SEQ ID NO: 3517 - RNA, 22 nt, Canis familiaris
uagcaccauuugaaaucgguua

SEQ ID NO: 3518 - RNA, 20 nt, Monodelphis domestica
uagcaccauuugaaaucggu

SEQ ID NO: 3519 - RNA, 20 nt, Monodelphis domestica
uagcaccauuugaaaucagu

SEQ ID NO: 3520 - RNA, 21 nt, Gallus gallus
uagcaccauuugaaaucgguu

SEQ ID NO: 3521 - RNA, 23 nt, Gallus gallus
uagcaccauuugaaaucaguguu

SEQ ID NO: 3522 - RNA, 20 nt, Gallus gallus
uagcaccauuugaaaucggu

SEQ ID NO: 3523 - RNA, 21 nt, Xenopus tropicalis
uagcaccauuugaaaucgguu

SEQ ID NO: 3524 - RNA, 23 nt, Xenopus tropicalis
uagcaccauuugaaaucaguguu

SEQ ID NO: 3525 - RNA, 20 nt, Xenopus tropicalis
uagcaccauuugaaaucggu

SEQ ID NO: 3526 - RNA, 23 nt, Xenopus tropicalis
uagcaccauaugaaaucaguguc

SEQ ID NO: 3527 - RNA, 24 nt, Bos taurus
uagcaccauuugaaaucaguguuu

SEQ ID NO: 3528 - RNA, 22 nt, Bos taurus
uagcaccauuugaaaucgguua

SEQ ID NO: 3529 - RNA, 20 nt, Sus scrofa
uagcaccauuugaaaucagu

SEQ ID NO: 3530 - RNA, 22 nt, Sus scrofa
uagcaccauuugaaaucgguua

SEQ ID NO: 3531 - RNA, 22 nt, Danio rerio
uagcaccauuugaaaucgguua

SEQ ID NO: 3532 - RNA, 22 nt, Danio rerio
uagcaccauuugaaaucagugu

SEQ ID NO: 3533 - RNA, 22 nt, Fugu rubripes
uagcaccauuugaaaucgguua

SEQ ID NO: 3534 - RNA, 22 nt, Fugu rubripes
uagcaccauuugaaaucagugu

SEQ ID NO: 3535 - RNA, 22 nt, Tetraodon nigroviridis
uagcaccauuugaaaucgguua

SEQ ID NO: 3536 - RNA, 22 nt, Tetraodon nigroviridis
uagcaccauuugaaaucagugu

SEQ ID NO: 3537 - RNA, 22 nt, Mus musculus
uguaaacauccucgacuggaag

SEQ ID NO: 3538 - RNA, 22 nt, Mus musculus
uguaaacauccuacacucagcu

SEQ ID NO: 3539 - RNA, 23 nt, Mus musculus
uguaaacauccuacacucucagc

SEQ ID NO: 3540 - RNA, 22 nt, Mus musculus
uguaaacauccccgacuggaag

SEQ ID NO: 3541 - RNA, 22 nt, Mus musculus
uguaaacauccuugacuggaag

SEQ ID NO: 3542 - RNA, 22 nt, Rattus norvegicus
uguaaacauccucgacuggaag

SEQ ID NO: 3543 - RNA, 22 nt, Rattus norvegicus
uguaaacauccuacacucagcu

SEQ ID NO: 3544 - RNA, 23 nt, Rattus norvegicus
uguaaacauccuacacucucagc

SEQ ID NO: 3545 - RNA, 22 nt, Rattus norvegicus
uguaaacauccccgacuggaag

SEQ ID NO: 3546 - RNA, 22 nt, Rattus norvegicus
uguaaacauccuugacuggaag

SEQ ID NO: 3547 - RNA, 21 nt, Ateles geoffroyi
uguaaacauccuacacucagc

SEQ ID NO: 3548 - RNA, 21 nt, Lagothrix lagotricha
uguaaacauccuacacucagc

SEQ ID NO: 3549 - RNA, 23 nt, Lagothrix lagotricha
uguaaacauccuacacucucagc

SEQ ID NO: 3550 - RNA, 22 nt, Macaca mulatta
uguaaacauccucgacuggaag

SEQ ID NO: 3551 - RNA, 21 nt, Macaca mulatta
uguaaacauccuacacucagc

SEQ ID NO: 3552 - RNA, 23 nt, Macaca mulatta
uguaaacauccuacacucucagc

SEQ ID NO: 3553 - RNA, 22 nt, Macaca mulatta
uguaaacauccccgacuggaag

SEQ ID NO: 3554 - RNA, 22 nt, Macaca mulatta
uguaaacauccuugacuggaag

SEQ ID NO: 3555 - RNA, 21 nt, Macaca nemestrina
uguaaacauccuacacucagc

SEQ ID NO: 3556 - RNA, 23 nt, Macaca nemestrina
uguaaacauccuacacucucagc

SEQ ID NO: 3557 - RNA, 22 nt, Macaca nemestrina
uguaaacauccccgacuggaag

SEQ ID NO: 3558 - RNA, 22 nt, Gorilla gorilla
uguaaacauccucgacuggaag

SEQ ID NO: 3559 - RNA, 21 nt, Gorilla gorilla
uguaaacauccuacacucagc

SEQ ID NO: 3560 - RNA, 22 nt, Gorilla gorilla
uguaaacauccccgacuggaag

SEQ ID NO: 3561 - RNA, 22 nt, Pan paniscus
uguaaacauccucgacuggaag

SEQ ID NO: 3562 - RNA, 21 nt, Pan paniscus
uguaaacauccuacacucagc

SEQ ID NO: 3563 - RNA, 22 nt, Pan paniscus
uguaaacauccccgacuggaag

SEQ ID NO: 3564 - RNA, 22 nt, Pan troglodytes
uguaaacauccucgacuggaag

SEQ ID NO: 3565 - RNA, 21 nt, Pan troglodytes
uguaaacauccuacacucagc

SEQ ID NO: 3566 - RNA, 23 nt, Pan troglodytes
uguaaacauccuacacucucagc

SEQ ID NO: 3567 - RNA, 22 nt, Pan troglodytes
uguaaacauccccgacuggaag

SEQ ID NO: 3568 - RNA, 22 nt, Pongo pygmaeus
uguaaacauccucgacuggaag

SEQ ID NO: 3569 - RNA, 23 nt, Canis familiaris
uguaaacauccucgacuggaagc

SEQ ID NO: 3570 - RNA, 22 nt, Canis familiaris
uguaaacauccuacacucagcu

SEQ ID NO: 3571 - RNA, 24 nt, Canis familiaris
uguaaacauccuacacucucagcu

SEQ ID NO: 3572 - RNA, 24 nt, Canis familiaris
uguaaacauccccgacuggaagcu

SEQ ID NO: 3573 - RNA, 22 nt, Monodelphis domestica
uguaaacauccucgacuggaag

SEQ ID NO: 3574 - RNA, 22 nt, Gallus gallus
uguaaacauccucgacuggaag

SEQ ID NO: 3575 - RNA, 22 nt, Gallus gallus
uguaaacauccuacacucagcu

SEQ ID NO: 3576 - RNA, 24 nt, Gallus gallus
uguaaacauccuacacucucagcu

SEQ ID NO: 3577 - RNA, 22 nt, Gallus gallus
uguaaacauccccgacuggaag

SEQ ID NO: 3578 - RNA, 19 nt, Gallus gallus
uguaaacauccuugacugg

SEQ ID NO: 3579 - RNA, 22 nt, Xenopus tropicalis
uguaaacauccucgacuggaag

SEQ ID NO: 3580 - RNA, 22 nt, Xenopus tropicalis
uguaaacauccuacacucagcu

SEQ ID NO: 3581 - RNA, 23 nt, Xenopus tropicalis
uguaaacauccuacacucucagc

SEQ ID NO: 3582 - RNA, 22 nt, Xenopus tropicalis
uguaaacauccccgacuggaag

SEQ ID NO: 3583 - RNA, 22 nt, Xenopus tropicalis
uguaaacauccuugacuggaag

SEQ ID NO: 3584 - RNA, 24 nt, Bos taurus
uguaaacauccucgacuggaagcu

SEQ ID NO: 3585 - RNA, 22 nt, Bos taurus
uguaaacauccuacacucagcu

SEQ ID NO: 3586 - RNA, 23 nt, Bos taurus
uguaaacauccuacacucucagc

SEQ ID NO: 3587 - RNA, 24 nt, Bos taurus
uguaaacauccccgacuggaagcu

SEQ ID NO: 3588 - RNA, 24 nt, Bos taurus
uguaaacauccuugacuggaagcu

SEQ ID NO: 3589 - RNA, 23 nt, Sus scrofa
uguaaacauccuacacucucagc

SEQ ID NO: 3590 - RNA, 22 nt, Danio rerio
uguaaacauucccgacuggaag

SEQ ID NO: 3591 - RNA, 22 nt, Danio rerio
uguaaacauccuacacucagcu

SEQ ID NO: 3592 - RNA, 22 nt, Danio rerio
uguaaacauccuacacucucag

SEQ ID NO: 3593 - RNA, 22 nt, Danio rerio
uguaaacauccccgacuggaag

SEQ ID NO: 3594 - RNA, 22 nt, Danio rerio
uguaaacauccuugacuggaag

SEQ ID NO: 3595 - RNA, 22 nt, Fugu rubripes
uguaaacauccuacacucagcu

SEQ ID NO: 3596 - RNA, 22 nt, Fugu rubripes
uguaaacauccuacacucucgg

SEQ ID NO: 3597 - RNA, 22 nt, Fugu rubripes
uguaaacauccccgacuggaag

SEQ ID NO: 3598 - RNA, 22 nt, Tetraodon nigroviridis
uguaaacauccuacacucagcu

SEQ ID NO: 3599 - RNA, 22 nt, Tetraodon nigroviridis
uguaaacauccuacacucucgg

SEQ ID NO: 3600 - RNA, 22 nt, Tetraodon nigroviridis
uguaaacauccccgacuggaag

SEQ ID NO: 3601 - RNA, 20 nt, Lagothrix lagotricha
ucaaaugcucagacuccugu

SEQ ID NO: 3602 - RNA, 20 nt, Saguinus labiatus
ucaaaugcucagacuccugu

SEQ ID NO: 3603 - RNA, 23 nt, Macaca mulatta
ucaaaugcucagacuccuguggu

SEQ ID NO: 3604 - RNA, 20 nt, Macaca nemestrina
ucaaaugcucagacuccugu

SEQ ID NO: 3605 - RNA, 20 nt, Gorilla gorilla
ucaaaugcucagacuccugu

SEQ ID NO: 3606 - RNA, 20 nt, Pan paniscus
ucaaaugcucagacuccugu

SEQ ID NO: 3607 - RNA, 20 nt, Pan troglodytes
ucaaaugcucagacuccugu

SEQ ID NO: 3608 - RNA, 20 nt, Pongo pygmaeus
ucaaaugcucagacuccugu

SEQ ID NO: 3609 - RNA, 20 nt, Sus scrofa
ucaaaugcucagacuccugu

SEQ ID NO: 3610 - RNA, 20 nt, Sus scrofa
ucaaaugcucagacuccuug

SEQ ID NO: 3611 - RNA, 22 nt, Ateles geoffroyi
uuaaggcacgcggugaaugcca

SEQ ID NO: 3612 - RNA, 22 nt, Lagothrix lagotricha
uuaaggcacgcggugaaugcca

SEQ ID NO: 3613 - RNA, 22 nt, Macaca mulatta
uuaaggcacgcggugaaugcca

SEQ ID NO: 3614 - RNA, 22 nt, Gorilla gorilla
uuaaggcacgcggugaaugcca

SEQ ID NO: 3615 - RNA, 22 nt, Pan paniscus
uuaaggcacgcggugaaugcca

SEQ ID NO: 3616 - RNA, 22 nt, Pan troglodytes
uuaaggcacgcggugaaugcca

SEQ ID NO: 3617 - RNA, 22 nt, Pongo pygmaeus
uuaaggcacgcggugaaugcca

SEQ ID NO: 3618 - RNA, 22 nt, Monodelphis domestica
uuaaggcacgcggugaaugcca

SEQ ID NO: 3619 - RNA, 22 nt, Gallus gallus
uuaaggcacgcggugaaugcca

SEQ ID NO: 3620 - RNA, 22 nt, Gallus gallus
uuaaggcacgcagugaaugcca

SEQ ID NO: 3621 - RNA, 22 nt, Xenopus tropicalis
uuaaggcacgcggugaaugcca

SEQ ID NO: 3622 - RNA, 23 nt, Bos taurus
uuaaggcacgcggugaaugccaa

SEQ ID NO: 3623 - RNA, 22 nt, Sus scrofa
uuaaggcacgcggugaaugcca

SEQ ID NO: 3624 - RNA, 22 nt, Mus musculus
ucucccaacccuuguaccagug

SEQ ID NO: 3625 - RNA, 22 nt, Rattus norvegicus
ucucccaacccuuguaccagug

SEQ ID NO: 3626 - RNA, 22 nt, Macaca mulatta
ucucccaacccuuguaccagug

SEQ ID NO: 3627 - RNA, 22 nt, Canis familiaris
ucucccaacccuuguaccagug

SEQ ID NO: 3628 - RNA, 22 nt, Xenopus tropicalis
ucucccaacccuuguaccagag

SEQ ID NO: 3629 - RNA, 23 nt, Bos taurus
ucucccaacccuuguaccagugu

SEQ ID NO: 3630 - RNA, 22 nt, Danio rerio
ucucccaauccuuguaccagug

SEQ ID NO: 3631 - RNA, 22 nt, Mus musculus
uagguuauccguguugccuucg

SEQ ID NO: 3632 - RNA, 22 nt, Rattus norvegicus
uagguuauccguguugccuucg

SEQ ID NO: 3633 - RNA, 22 nt, Macaca mulatta
uagguuauccguguugccuucg

SEQ ID NO: 3634 - RNA, 22 nt, Macaca nemestrina
uagguuauccguguugccuucg

SEQ ID NO: 3635 - RNA, 22 nt, Gorilla gorilla
uagguuauccguguugccuucg

SEQ ID NO: 3636 - RNA, 22 nt, Pan paniscus
uagguuauccguguugccuucg

SEQ ID NO: 3637 - RNA, 22 nt, Pan troglodytes
uagguuauccguguugccuucg

SEQ ID NO: 3638 - RNA, 22 nt, Pongo pygmaeus
uagguuauccguguugccuucg

SEQ ID NO: 3639 - RNA, 22 nt, Mus musculus
uaugugggacgguaaaccgcuu

SEQ ID NO: 3640 - RNA, 22 nt, Macaca mulatta
uaugugggacgguaaaccgcuu

SEQ ID NO: 3641 - RNA, 22 nt, Bos taurus
ugguugaccauagaacaugcgc

SEQ ID NO: 3642 - RNA, 22 nt, Mus musculus
agaucagaaggugacuguggcu

SEQ ID NO: 3643 - RNA, 22 nt, Rattus norvegicus
agaucagaaggugacuguggcu

SEQ ID NO: 3644 - RNA, 22 nt, Macaca mulatta
agaucagaaggugauuguggcu

SEQ ID NO: 3645 - RNA, 22 nt, Canis familiaris
agaucagaaggugauuguggcu

SEQ ID NO: 3646 - RNA, 22 nt, Monodelphis domestica
agaucagaaggugauuguggcu

SEQ ID NO: 3647 - RNA, 22 nt, Gallus gallus
agaucagaaggugauuguggcu

SEQ ID NO: 3648 - RNA, 22 nt, Xenopus tropicalis
agaucagaaggugauuguggcu

SEQ ID NO: 3649 - RNA, 21 nt, Mus musculus
uaguagaccguauagcguacg

SEQ ID NO: 3650 - RNA, 21 nt, Rattus norvegicus
uaguagaccguauagcguacg

SEQ ID NO: 3651 - RNA, 21 nt, Macaca mulatta
uaguagaccguauagcguacg

SEQ ID NO: 3652 - RNA, 23 nt, Mus musculus
agcucggucugaggccccucagu

SEQ ID NO: 3653 - RNA, 23 nt, Rattus norvegicus
agcucggucugaggccccucagu

SEQ ID NO: 3654 - RNA, 23 nt, Macaca mulatta
agcucggucugaggccccucagu

SEQ ID NO: 3655 - RNA, 22 nt, Mus musculus
aucaugaugggcuccucggugu

SEQ ID NO: 3656 - RNA, 22 nt, Rattus norvegicus
aucaugaugggcuccucggugu

SEQ ID NO: 3657 - RNA, 22 nt, Macaca mulatta
aucaugaugggcuccucggugu

SEQ ID NO: 3658 - RNA, 22 nt, Canis familiaris
aucaugaugggcuccucggugu

SEQ ID NO: 3659 - RNA, 23 nt, Macaca mulatta
uagugcaauauugcuuauagggu

SEQ ID NO: 3660 - RNA, 22 nt, Danio rerio
uagugcaauauugcuaauaggg

SEQ ID NO: 3661 - RNA, 22 nt, Danio rerio
uagugcaauauugcuuauaggg

SEQ ID NO: 3662 - RNA, 22 nt, Mus musculus
aauccuuugucccugggugaaa

SEQ ID NO: 3663 - RNA, 22 nt, Rattus norvegicus
aauccuuugucccugggugaaa

SEQ ID NO: 3664 - RNA, 22 nt, Macaca mulatta
aauccuuugucccugggugaga

SEQ ID NO: 3665 - RNA, 22 nt, Mus musculus
agacccuggucugcacucuauc

SEQ ID NO: 3666 - RNA, 22 nt, Macaca mulatta
agacccuggucugcacucuauc

SEQ ID NO: 3667 - RNA, 21 nt, Macaca mulatta
uaaggcacccuucugaguaga

SEQ ID NO: 3668 - RNA, 21 nt, Pygathrix bieti
uaaggcacccuucugaguaga

SEQ ID NO: 3669 - RNA, 21 nt, Pan troglodytes
uaaggcacccuucugaguaga

SEQ ID NO: 3670 - RNA, 21 nt, Symphalangus syndactylus
uaaggcacccuucugaguaga

SEQ ID NO: 3671 - RNA, 21 nt, Macaca mulatta
uuuugcaccuuuuggagugaa

SEQ ID NO: 3672 - RNA, 21 nt, Pygathrix bieti
uuuugcaccuuuuggagugaa

SEQ ID NO: 3673 - RNA, 21 nt, Pan troglodytes
uuuugcaccuuuuggagugaa

SEQ ID NO: 3674 - RNA, 21 nt, Symphalangus syndactylus
uuuugcaccuuuuggagugaa

SEQ ID NO: 3675 - RNA, 23 nt, Pan troglodytes
ugauuguagccuuuuugaguaga

SEQ ID NO: 3676 - RNA, 23 nt, Symphalangus syndactylus
ugauuguagcccuuuugaguaga

SEQ ID NO: 3677 - RNA, 22 nt, Macaca mulatta
aagugcugucauugcugagauc

SEQ ID NO: 3678 - RNA, 20 nt, Macaca mulatta
aaaguagcuguaccauuugc

SEQ ID NO: 3679 - RNA, 22 nt, Macaca mulatta
ugugucacuugacgaccacugu

SEQ ID NO: 3680 - RNA, 23 nt, Macaca mulatta
uaaaucccacggugccuucuccu

SEQ ID NO: 3681 - RNA, 21 nt, Macaca mulatta
augauccaggaaccugccucu

SEQ ID NO: 3682 - RNA, 23 nt, Macaca mulatta
ugcaccaugguugucugagcaug

SEQ ID NO: 3683 - RNA, 23 nt, Macaca mulatta
uccaguaccacgugucagggcca

SEQ ID NO: 3684 - RNA, 23 nt, Macaca mulatta
caguaacaaagauucauccuugu

SEQ ID NO: 3685 - RNA, 22 nt, Homo sapiens
uagcaccauuugaaaucgguua

SEQ ID NO: 3686 - RNA, 23 nt, Homo sapiens
uguaaacauccuacacucucagc

SEQ ID NO: 3687 - RNA, 22 nt, Homo sapiens
uguaaacauccccgacuggaag

SEQ ID NO: 3688 - RNA, 22 nt, Homo sapiens
uguaaacauccuugacuggaag

SEQ ID NO: 3689 - RNA, 23 nt, Mus musculus
uguaaacaauuccuaggcaaugu

SEQ ID NO: 3690 - RNA, 23 nt, Rattus norvegicus
uguaaacaauuccuaggcaaugu

SEQ ID NO: 3691 - RNA, 19 nt, Homo sapiens
agguugacauacguuuccc

SEQ ID NO: 3692 - RNA, 22 nt, Homo sapiens
cagugcaauguuaaaagggcau

SEQ ID NO: 3693 - RNA, 22 nt, Homo sapiens
cagugcaaugaugaaagggcau

SEQ ID NO: 3694 - RNA, 23 nt, Homo sapiens
cagugcaauaguauugucaaagc

SEQ ID NO: 3695 - RNA, 23 nt, Homo sapiens
cagugcaaugauauugucaaagc

SEQ ID NO: 3696 - RNA, 22 nt, Mus musculus
cagugcaauguuaaaagggcau

SEQ ID NO: 3697 - RNA, 22 nt, Mus musculus
cagugcaaugaugaaagggcau

SEQ ID NO: 3698 - RNA, 23 nt, Mus musculus
cagugcaauaguauugucaaagc

SEQ ID NO: 3699 - RNA, 23 nt, Mus musculus
cagugcaaugguauugucaaagc

SEQ ID NO: 3700 - RNA, 21 nt, Mus musculus
cagugcaauuaaaagggggaa

SEQ ID NO: 3701 - RNA, 22 nt, Rattus norvegicus
cagugcaauguuaaaagggcau

SEQ ID NO: 3702 - RNA, 22 nt, Rattus norvegicus
cagugcaaugaugaaagggcau

SEQ ID NO: 3703 - RNA, 23 nt, Rattus norvegicus
cagugcaauaguauugucaaagc

SEQ ID NO: 3704 - RNA, 23 nt, Rattus norvegicus
cagugcaaugguauugucaaagc

SEQ ID NO: 3705 - RNA, 20 nt, Macaca mulatta
cagugcaauguuaaaagggc

SEQ ID NO: 3706 - RNA, 22 nt, Macaca mulatta
cagugcaaugaugaaagggcau

SEQ ID NO: 3707 - RNA, 23 nt, Macaca mulatta
cagugcaauaguauugucaaagc

SEQ ID NO: 3708 - RNA, 23 nt, Macaca mulatta
cagugcaaugauauugucaaagc

SEQ ID NO: 3709 - RNA, 20 nt, Macaca nemestrina
cagugcaauguuaaaagggc

SEQ ID NO: 3710 - RNA, 20 nt, Gorilla gorilla
cagugcaauguuaaaagggc

SEQ ID NO: 3711 - RNA, 20 nt, Pan paniscus
cagugcaauguuaaaagggc

SEQ ID NO: 3712 - RNA, 22 nt, Canis familiaris
cagugcaauguuaaaagggcau

SEQ ID NO: 3713 - RNA, 22 nt, Canis familiaris
cagugcaaugaugaaagggcau

SEQ ID NO: 3714 - RNA, 22 nt, Monodelphis domestica
cagugcaauguaaaaagggcau

SEQ ID NO: 3715 - RNA, 22 nt, Gallus gallus
cagugcaauauuaaaagggcau

SEQ ID NO: 3716 - RNA, 22 nt, Gallus gallus
cagugcaauaaugaaagggcgu

SEQ ID NO: 3717 - RNA, 25 nt, Gallus gallus
cagugcaauaauauugucaaagcau

SEQ ID NO: 3718 - RNA, 22 nt, Xenopus tropicalis
cagugcaauguuaaaagggcau

SEQ ID NO: 3719 - RNA, 22 nt, Xenopus tropicalis
cagugcaaugaugaaagggcau

SEQ ID NO: 3720 - RNA, 22 nt, Xenopus tropicalis
cagugcaauauuaaaagggcau

SEQ ID NO: 3721 - RNA, 23 nt, Xenopus tropicalis
cagugcaauaguauugucaaagc

SEQ ID NO: 3722 - RNA, 22 nt, Danio rerio
cagugcaauguuaaaagggcau

SEQ ID NO: 3723 - RNA, 22 nt, Danio rerio
cagugcaauaaugaaagggcau

SEQ ID NO: 3724 - RNA, 22 nt, Danio rerio
cagugcaauauuaaaagggcau

SEQ ID NO: 3725 - RNA, 22 nt, Danio rerio
cagugcaauaguauugucaaag

SEQ ID NO: 3726 - RNA, 22 nt, Danio rerio
cagugcaauaguauugucauug

SEQ ID NO: 3727 - RNA, 22 nt, Danio rerio
cagugcaauaguauugucauag

SEQ ID NO: 3728 - RNA, 22 nt, Fugu rubripes
cagugcaauauuaaaagggcau

SEQ ID NO: 3729 - RNA, 22 nt, Fugu rubripes
cagugcaauaguauugucauag

SEQ ID NO: 3730 - RNA, 22 nt, Tetraodon nigroviridis
cagugcaauauuaaaagggcau

SEQ ID NO: 3731 - RNA, 22 nt, Tetraodon nigroviridis
cagugcaauaguauugucauag

SEQ ID NO: 3732 - RNA, 20 nt, Mus musculus
uaaggcacgcggugaaugcc

SEQ ID NO: 3733 - RNA, 20 nt, Rattus norvegicus
uaaggcacgcggugaaugcc

SEQ ID NO: 3734 - RNA, 21 nt, Canis familiaris
uaaggcacgcggugaaugcca

SEQ ID NO: 3735 - RNA, 22 nt, Danio rerio
uaaggcacgcggugaaugccaa

SEQ ID NO: 3736 - RNA, 22 nt, Fugu rubripes
uaaggcacgcggugaaugccaa

SEQ ID NO: 3737 - RNA, 22 nt, Tetraodon nigroviridis
uaaggcacgcggugaaugccaa

SEQ ID NO: 3738 - RNA, 23 nt, Homo sapiens
guuugcacgggugggccuugucu

SEQ ID NO: 3739 - RNA, 22 nt, Mus musculus
gagugcuggaauuaaaggcaug

SEQ ID NO: 3740 - RNA, 21 nt, Xenopus tropicalis
aagugcuguucgugcagguag

SEQ ID NO: 3741 - RNA, 20 nt, Homo sapiens
cugcaaagggaagcccuuuc

SEQ ID NO: 3742 - RNA, 64 nt, Homo sapiens
augacugauuucuuuugguguucagagucaauauaauuuucuagcaccaucugaaaucgguuau

SEQ ID NO: 3743 - RNA, 81 nt, Homo sapiens
cuucaggaagcugguuucauauggugguuuagauuuaaauagugauugucuagcaccauuugaaaucaguguucuuggggg

SEQ ID NO: 3744 - RNA, 81 nt, Homo sapiens
cuucuggaagcugguuucacaugguggcuuagauuuuuccaucuuuguaucuagcaccauuugaaaucaguguuuuaggag

SEQ ID NO: 3745 - RNA, 88 nt, Homo sapiens
accaaguuucaguucauguaaacauccuacacucagcuguaauacauggauuggcugggagguggauguuuacuucagcugacuugga

SEQ ID NO: 3746 - RNA, 81 nt, Homo sapiens
ugugcaucguggucaaaugcucagacuccugugguggcugcucaugcaccacggauguuugagcaugugcuacggugucua

SEQ ID NO: 3747 - RNA, 81 nt, Homo sapiens
ugugcaucguggucaaaugcucagacuccugugguggcugcuuaugcaccacggauguuugagcaugugcuauggugucua

SEQ ID NO: 3748 - RNA, 85 nt, Homo sapiens
aggccucucucuccguguucacagcggaccuugauuuaaauguccauacaauuaaggcacgcggugaaugccaagaauggggcug

SEQ ID NO: 3749 - RNA, 109 nt, Homo sapiens
aucaagauuagaggcucugcucuccguguucacagcggaccuugauuuaaugucauacaauuaaggcacgcggugaaugccaagagcggagccuacggcugcacuugaa

SEQ ID NO: 3750 - RNA, 87 nt, Homo sapiens
ugagggccccucugcguguucacagcggaccuugauuuaaugucuauacaauuaaggcacgcggugaaugccaagagaggcgccucc

SEQ ID NO: 3751 - RNA, 84 nt, Homo sapiens
cuccccauggcccugucucccaacccuuguaccagugcugggcucagacccugguacaggccugggggacagggaccuggggac

SEQ ID NO: 3752 - RNA, 84 nt, Homo sapiens
gugguacuugaagauagguuauccguguugccuucgcuuuauuugugacgaaucauacacgguugaccuauuuuucaguaccaa

SEQ ID NO: 3753 - RNA, 61 nt, Homo sapiens
aagaugguugaccauagaacaugcgcuaucucugugucguauguaauaugguccacaucuu

SEQ ID NO: 3754 - RNA, 73 nt, Homo sapiens
cuccucagaucagaaggugauuguggcuuuggguggauauuaaucagccacagcacugccuggucagaaagag

SEQ ID NO: 3755 - RNA, 96 nt, Homo sapiens
ugguacuuggagagauaguagaccguauagcguacgcuuuaucugugacguauguaacacgguccacuaacccucaguaucaaauccauccccgag

SEQ ID NO: 3756 - RNA, 94 nt, Homo sapiens
auaaaggaaguuaggcugaggggcagagagcgagacuuuucuauuuuccaaaagcucggucugaggccccucagucuugcuuccuaacccgcgc

SEQ ID NO: 3757 - RNA, 93 nt, Homo sapiens
ccggggagaaguacggugagccugucauuauucagagaggcuagauccucuguguugagaaggaucaugaugggcuccucgguguucuccagg

SEQ ID NO: 3758 - RNA, 115 nt, Homo sapiens
ucuguuuaucaccagauccuagaacccuaucaauauugucucugcuguguaaauaguucugaguagugcaauauugcuuauaggguuuugguguuuggaaagaacaaugggcagg

SEQ ID NO: 3759 - RNA, 84 nt, Homo sapiens
gcucuuccucucuaauccuuugucccugggugagagugcuuucugaaugcaaugcacccgggcaaggauucugagagggugagc

SEQ ID NO: 3760 - RNA, 83 nt, Homo sapiens
gcugcuguugggagacccuggucugcacucuaucuguauucuuacugaagggagugcagggcaggguuucccauacagagggc

SEQ ID NO: 3761 - RNA, 124 nt, Homo sapiens
gccaccaccaucagccauacuauguguagugccuuauucaggaagguguuacuuaauagauuaauauuuguaaggcacccuucugaguagaguaaugugcaacauggacaacauuugugguggc

SEQ ID NO: 3762 - RNA, 94 nt, Homo sapiens
gugcuguguguagugcuucacuucaagaagugccaugcaugugucuagaaauauguuuugcaccuuuuggagugaaauaaugcacaacagauac

SEQ ID NO: 3763 - RNA, 115 nt, Homo sapiens
ccaccuucagcugaguguagugcccuacuccagagggcgucacucauguaaacuaaaacaugauuguagccuuuuggaguagaguaauacacaucacguaacgcauauuuggugg

SEQ ID NO: 3764 - RNA, 87 nt, Homo sapiens
caauagacacccaucgugucuuuugcucugcagucaguaaauauuuuuuugugaauguguagcaaaagacagaauggugguccauug

SEQ ID NO: 3765 - RNA, 87 nt, Homo sapiens; identical to SEQ ID NO: 3764

SEQ ID NO: 3766 - RNA, 84 nt, Homo sapiens
ucucagucuguggcacucagccuugagggcacuuucuggugccagaaugaaagugcugucauagcugagguccaaugacugagg

SEQ ID NO: 3767 - RNA, 98 nt, Homo sapiens
gguacuucucagucuguggcacucagccuugagggcacuuucuggugccagaaugaaagugcugucauagcugagguccaaugacugaggcgagcacc

SEQ ID NO: 3768 - RNA, 85 nt, Homo sapiens
ucucaagcugugacugcaaagggaagcccuuucuguugucuaaaagaaaagaaagugcuucccuuuggugaauuacgguuugaga

SEQ ID NO: 3769 - RNA, 95 nt, Homo sapiens
agugaaauugcuaggucauauggucagucuacuuuuagaguaauugugaaacuguuuuucaaaguagcuguaccauuugcacucccuguggcaau

SEQ ID NO: 3770 - RNA, 98 nt, Homo sapiens
ggauucuuauaggacaguauguucuuccaggacagaacauucuuugcuauuuuguacuggaagaacaugcaaaacuaaaaaaaaaaaaaguuauugcu

SEQ ID NO: 3771 - RNA, 99 nt, Homo sapiens
uccagccugugcccagcagccccugagaaccacgucugcucugagcuggguacugccuguucagaacaaaugccgguucccagacgcugccagcuggcc

SEQ ID NO: 3772 - RNA, 97 nt, Homo sapiens
uacuuacucuacgugugugucacucgaugaccacugugaagacaguaaaauguacagugguucucuuguggcucaagcguaauguagaguacugguc

SEQ ID NO: 3773 - RNA, 83 nt, Homo sapiens
gcccuagcuugguucuaaaucccauggugccuucuccuugggaaaaacagagaaggcacuaugagauuuagaaucaaguuagg

SEQ ID NO: 3774 - RNA, 99 nt, Homo sapiens
cgcccaccucagccucccaaaaugcugggauuacaggcaugagccacugcggucgaccaugaccuggacauguuugugcccaguacugucaguuugcag

SEQ ID NO: 3775 - RNA, 97 nt, Homo sapiens
ucccuuucccaggggaggggcuggguuuacguugggagaacuuuuacggugaaccaggagguucucccaacguaagcccagccccuccccucugccu

SEQ ID NO: 3776 - RNA, 96 nt, Homo sapiens
gugacccugggcaaguuccugaagaucagacacaucagaucccuuaucuguaaaaugggcaugauccaggaaccugccucuacgguugccuugggg

SEQ ID NO: 3777 - RNA, 109 nt, Homo sapiens
gcuuuuauauuguagguuuuugcucaugcaccaugguugucugagcaugcagcaugcuugucugcucauaccccaugguuucugagcaggaaccuucauugucuacugc

SEQ ID NO: 3778 - RNA, 98 nt, Homo sapiens
aggagccaccuuccgagccuccaguaccacgugucagggccacaugagcugggccucgugggccugauguggugcuggggccucaggggucugcucuu

SEQ ID NO: 3779 - RNA, 94 nt, Homo sapiens
guucuguuauuugcagucaguaacaaagauucauccuuguguccaucaugcaacaaggagaaucuuugucacuuaguguaauuaauagcuggac

SEQ ID NO: 3780 - RNA, 70 nt, Xenopus tropicalis
uuuagcagcacguaaauacuggaguucaugaccauaucugcacucuccaguauuacuuugcugcuauauu

SEQ ID NO: 3781 - RNA, 84 nt, Mus musculus
gucagaauaaugucaaagugcuuacagugcagguagugaugugugcaucuacugcagugagggcacuuguagcauuaugcugac

SEQ ID NO: 3782 - RNA, 59 nt, Canis familiaris
caaagugcuuacagugcagguagugauaugugcaucuacugcagugaaggcacuuguag

SEQ ID NO: 3783 - RNA, 138 nt, Danio rerio
ggacuuucuugaguggacuugguuggugucaauguauugucaaagugcuuacagugcagguaguauuauggaauaucuacugcaguggaggcacuucuagcaauacacuugaccauuuuaaccuuccuccaggcaucc

SEQ ID NO: 3784 - RNA, 83 nt, Danio rerio
gucacuguagugucaaagugcuuacagugcagguaguucaauauaaucuacugcaguggaggcacuucaagcuuuaccgugac

SEQ ID NO: 3785 - RNA, 79 nt, Xenopus laevis
ccuuguguuaaggugcaucuagugcaguuagugacauagcguagcaucuacugcccuaaaugcuccuuuuggcacaggg

SEQ ID NO: 3786 - RNA, 107 nt, Mus musculus
gugugaugugacagcuucuguagcacuaaagugcuuauagugcagguaguguguagccaucuacugcauuacgagcacuuaaaguacugccagcuguagaacuccag

SEQ ID NO: 3787 - RNA, 67 nt, Xenopus tropicalis
cucuugugccuacugaacugauaucaguucuauuucacacacuggcucaguucagcaggaacaggag

SEQ ID NO: 3788 - RNA, 90 nt, Mus musculus
aaggccguggccucguucaaguaauccaggauaggcugugcaggucccaaggggccuauucuugguuacuugcacggggacgcgggccug

SEQ ID NO: 3789 - RNA, 84 nt, Mus musculus
ggcugcggcuggauucaaguaauccaggauaggcuguguccguccaugaggccuguucuugauuacuuguuucuggaggcagcg

SEQ ID NO: 3790 - RNA, 71 nt, Mus musculus
gcgacuguaaacauccucgacuggaagcugugaagccacaaaugggcuuucagucggauguuugcagcugc

SEQ ID NO: 3791 - RNA, 92 nt, Mus musculus; identical to SEQ ID NO: 1920

SEQ ID NO: 3792 - RNA, 71 nt, Rattus norvegicus
gcaacuguaaacauccucgacuggaagcugugaagccacaaaugggcuuucagucggauguuugcagcugc

SEQ ID NO: 3793 - RNA, 77 nt, Mus musculus; identical to SEQ ID NO: 1933

SEQ ID NO: 3794 - RNA, 99 nt, Mus musculus
agccaguuuggucuuuugagacaaaguucugagacacuccgacucugaguaugauagaagucagugcacuacagaacuuugucucuagaggcugugguc

SEQ ID NO: 3795 - RNA, 97 nt, Rattus norvegicus
caggcacucuuagcauuugaggugaaguucuguuauacacucaggcuguggcucugaaagucagugcaucacagaacuuugucucgaaagcuuucua

SEQ ID NO: 3796 - RNA, 80 nt, Mus musculus
ugcuucugugugauauguuugauauuggguuguuaaauuaugaaccaacugaaugucaagcauacucucacagcaguaag

SEQ ID NO: 3797 - RNA, 70 nt, Mus musculus
gccaucccaguguucagacuaccuguucaggaggcugggacauguacaguagucugcacauugguuaggc

SEQ ID NO: 3798 - RNA, 110 nt, Mus musculus
uggaagcuucaggagauccugcuccgucgccccaguguucagacuaccuguucaggacaaugccguuguacaguagucugcacauugguuagacugggcaagggccagca

SEQ ID NO: 3799 - RNA, 110 nt, Mus musculus
ccagaggauaccuccacuccgucuacccaguguuuagacuaccuguucaggacucccaaauuguacaguagucugcacauugguuaggcugggcuggguuagacccucgg

SEQ ID NO: 3800 - RNA, 110 nt, Rattus norvegicus
uggaagcuucuggagauccugcuccgucgccccaguguucagacuaccuguucaggacaaugccguuguacaguagucugcacauugguuagacugggcaagggccagca

SEQ ID NO: 3801 - RNA, 94 nt, Gallus gallus
cuccacuccgucugcccaguguucagacuaccuguucaggacuacgagauuguacaguagucugcacauugguuaggcugugcugggauacacc

SEQ ID NO: 3802 - RNA, 108 nt, Gallus gallus
gaagcguccggagauccugcuccgucgccccaguguucagacuaccuguucaggacaaugcuguuguacaguagucugcacauugguuagacugggcaagggaaagca

SEQ ID NO: 3803 - RNA, 104 nt, Bos taurus
uggaagcuucuggagauccugcuccgucgccccaguguucagacuaccuguucaggacaaugccguuguacaguagucugcacauugguuagacugggcaaggg

SEQ ID NO: 3804 - RNA, 83 nt, Mus musculus
uuccuuugacgggugagcuuuuggcccggguuauaccugacacucacguauaagacgagcaaaaagcuuguuggucagaggag

SEQ ID NO: 3805 - RNA, 83 nt, Danio rerio
cagcugucucuugugcuugaucuaaccaugugccgccgccuacacaagccucacaugguuccgucaagcaccagggaccgcug

SEQ ID NO: 3806 - RNA, 88 nt, Danio rerio
gcgggguuuuccuuugugcuugaucuaaccaugugguugcagacucagacuaauacaugguucugucaagcaccauggaaggucuugc

SEQ ID NO: 3807 - RNA, 63 nt, Mus musculus
aagaaaugguuuaccgucccacauacauuuugaguauguaugugggacgguaaaccgcuucuu

SEQ ID NO: 3808 - RNA, 63 nt, Rattus norvegicus; identical to SEQ ID NO: 3807

SEQ ID NO: 3809 - RNA, 98 nt, Mus musculus
auauagugcuugguuccuaguaggugcucaguaaguguuugugacauaauucguuuauugagcaccuccuaucaaucaagcacugugcuaggcucugg

SEQ ID NO: 3810 - RNA, 98 nt, Rattus norvegicus; identical to SEQ ID NO: 3809

SEQ ID NO: 3811 - RNA, 98 nt, Mus musculus
caacgcugcacaggccguccuccccaacaauauccuggugcugagugggugcacagugacuccagcaucagugauuuuguugaagagggcagcugcca

SEQ ID NO: 3812 - RNA, 67 nt, Macaca mulatta
ucuccaacaauauccuggugcugagugaugacucaggugacuccagcaucagugauuuuguugaaga

SEQ ID NO: 3813 - RNA, 85 nt, Mus musculus
aaagugcuuuggaaugacacgaucacucccguugagugggcacccaagaagccaucgggaaugucguguccgcccagugcucuuu

SEQ ID NO: 3814 - RNA, 83 nt, Rattus norvegicus
agugcuuuggaaugacacgaucacucccguugagugggcacccaagaagccaucgggaauaucguguccgcccagugcucuuu

SEQ ID NO: 3815 - RNA, 87 nt, Macaca mulatta
gaaagcgcuuuggaaugacacgaucacucccguugagugggcccccgagaagccaucgggaaugucguguccgcccagugcucuuuc

SEQ ID NO: 3816 - RNA, 63 nt, Canis familiaris
aaugacacgaucacucccguugagugggcacccaagaagccaucgggaaugucguguccgccc

SEQ ID NO: 3817 - RNA, 73 nt, Mus musculus
acuuggagagaggcuggccgugaugaauucgauucaucuaaacgagucauacacggcucuccucucuucuagu

SEQ ID NO: 3818 - RNA, 79 nt, Rattus norvegicus
gauacuuggagagaggcuggccgugaugaauucgauucaucuaaacgagucauacacggcucuccucucuucuaguguc

SEQ ID NO: 3819 - RNA, 59 nt, Canis familiaris
agaggcuggccgugaugaauucgauucaucaaagcgagucauacacggcucuccucucu

SEQ ID NO: 3820 - RNA, 68 nt, Macaca mulatta; identical to SEQ ID NO: 1585

SEQ ID NO: 3821 - RNA, 109 nt, Mus musculus
uucgggugagagugagaauccucucucccagauaauagcacucucaaacaaguuuccauguuguuugaaaggcuguuucuuggucagaagacucucaauuucuucugga

SEQ ID NO: 3822 - RNA, 85 nt, Macaca mulatta
cucaggcugugacccuccagagggaaguauuuucuguugucugaaggaaaagaaagugcuucccuuuggacuguuucgguuugag

SEQ ID NO: 3823 - RNA, 90 nt, Macaca mulatta
ucccaugcuguggcccucuagagaaagcacuuucuguuuguugucugaggaaaaacaaagugcuucccuucagaguguggcuguuuggga

SEQ ID NO: 3824 - RNA, 95 nt, Macaca mulatta
cagugcugggaucucaggaggcagcgcucucaggacgucuccaccauggucugggcucugcuccuccucacccuccucacucagggcacagguga

SEQ ID NO: 3825 - RNA, 95 nt, Macaca mulatta
cagugcugggaucucaggaggcagcgcucucaggacuucuccaccauggucugggcucugcuccuccucacccuccucacucagggcacagguga

SEQ ID NO: 3826 - RNA, 81 nt, Macaca mulatta; identical to SEQ ID NO: 1610

SEQ ID NO: 3827 - RNA, 84 nt, Mus musculus
ugcggcccagggacuggugcggaaagggcccacaguggacuugguacacuguaugcccuaaccgcucagucccugggucuggca

SEQ ID NO: 3828 - RNA, 84 nt, Danio rerio
uggugcugacugcuuguaacagcaacuccauguggaagguuugugucuuccaguggagcugcuguugcgugcagauagucacca

SEQ ID NO: 3829 - RNA, 88 nt, Mus musculus
ccaggcugagguaguaguuuguacaguuugagggucuaugauaccacccgguacaggagauaacuguacaggccacugccuugccagg

SEQ ID NO: 3830 - RNA, 84 nt, Xenopus tropicalis
accuguuuggaguacauacuucuuuauguacccauaugaacauacaaugcuauggaauguaaagaaguauguauuuuuaucagg

SEQ ID NO: 3831 - RNA, 71 nt, Xenopus tropicalis
ugggagacauacuucuuuauauguccauauggaagugccaaugcuauggaauguaaagaaguauguaucuc

SEQ ID NO: 3832 - RNA, 88 nt, Xenopus tropicalis
gggguugguuguuaucuuugguuaucuagcuguaugaguguugucaauccuucauaaagcuagauaaccgaaaguaaaaauaacccca

SEQ ID NO: 3833 - RNA, 85 nt, Xenopus tropicalis
ggaagugguuguuaucuuugguuaucuagcuguaugaguguauugguuuucauaaagcuagauaaccgaaaguaaaaacuccuuc

SEQ ID NO: 3834 - RNA, 89 nt, Sus scrofa; identical to SEQ ID NO: 1627

SEQ ID NO: 3835 - RNA, 87 nt, Sus scrofa; identical to SEQ ID NO: 1628

SEQ ID NO: 3836 - RNA, 75 nt, Mus musculus
cggacggcugggguuccuggggaugggauuugaugccagucacaaaucacauugccagggauuuccaacugaccc

SEQ ID NO: 3837 - RNA, 87 nt, Mus musculus
uggccugaggagcagggcuuagcugcuugugagcaagguccacagcaaagucguguucacaguggcuaaguuccgcccccuggaccc

SEQ ID NO: 3838 - RNA, 76 nt, Xenopus tropicalis
guaaccacuaggcaagaugcuggcaagcuaauuaccuuuuaccuggcuuuccaucucagucuagcagcauuauugg

SEQ ID NO: 3839 - RNA, 69 nt, Mus musculus
cuguggugcauuguaguugcauugcauguucuggcaauaccugugcaauguuuccacagugcaucacgg

SEQ ID NO: 3840 - RNA, 82 nt, Mus musculus; identical to SEQ ID NO: 2518

SEQ ID NO: 3841 - RNA, 73 nt, Mus musculus
ugacagcacauuauuacuuuugguacgcgcugugacacuucaaacucguaccgugaguaauaaugcgcgguca

SEQ ID NO: 3842 - RNA, 59 nt, Canis familiaris
cauuauuacuuuugguacgcgcugugacacuucaaacucguaccgugaguaauaaugcg

SEQ ID NO: 3843 - RNA, 70 nt, Mus musculus
guuggauucggggccguagcacugucugagagguuuacauuucucacagugaaccggucucuuuuucagc

SEQ ID NO: 3844 - RNA, 76 nt, Mus musculus
cagugggaaggggggccgaugcacuguaagagagugaguagcaggucucacagugaaccggucucuuucccuacug

SEQ ID NO: 3845 - RNA, 73 nt, Mus musculus
uggaucuuuuugcggucugggcuugcuguucucucgacaguagucaggaagcccuuaccccaaaaaguaucua

SEQ ID NO: 3846 - RNA, 90 nt, Mus musculus
ugccuuucgcgaaucuuuuugcggucugggcuugcuguacauaacucaauagccggaagcccuuaccccaaaaagcauucgcggagggcg

SEQ ID NO: 3847 - RNA, 72 nt, Macaca mulatta; identical to SEQ ID NO: 1641

SEQ ID NO: 3848 - RNA, 86 nt, Xenopus tropicalis
aaugcuuugcuaaagcugguaaaauggaaccaaaucaacuguugaauggauuugguccccuucaaccagcugcagcugugcauuga

SEQ ID NO: 3849 - RNA, 90 nt, Mus musculus
aggccucacuguucucuauggcuuuuuauuccuaugugauucuauugcucgcucauauagggauuggagccguggcguacggugaggaua

SEQ ID NO: 3850 - RNA, 100 nt, Mus musculus; identical to SEQ ID NO: 2611

SEQ ID NO: 3851 - RNA, 87 nt, Bos taurus; identical to SEQ ID NO: 1648

SEQ ID NO: 3852 - RNA, 91 nt, Danio rerio
cguacagugcagucauccauaaaguagaaagcacuacuaaaccccucgccacaguguaguguuuccuacuuuauggaugaguguacuguug

SEQ ID NO: 3853 - RNA, 73 nt, Macaca mulatta; identical to SEQ ID NO: 1650

SEQ ID NO: 3854 - RNA, 90 nt, Xenopus tropicalis
caaugaguucuuagcuuugagaacugaauuccauagguuguuagagguuagaccuauggugcuuaguuccauagcuuggaucccacuggc

SEQ ID NO: 3855 - RNA, 80 nt, Mus musculus
aggucacaaucaacauucauugcugucgguggguugaacuguguagaaaagcucacugaacaaugaaugcaacuguggcc

SEQ ID NO: 3856 - RNA, 89 nt, Mus musculus
uugauggcugcacucaacauucauugcugucgguggguuugaaugucaaccaacucacugaucaaugaaugcaaacugcgggccaaaaa

SEQ ID NO: 3857 - RNA, 72 nt, Fugu rubripes
uguuuggcaaugguagaacucacacuggugagguagauggauccggugguucuagacuugccaacuacugcu

SEQ ID NO: 3858 - RNA, 67 nt, Tetraodon nigroviridis
uguuuggcaaugguagaacucacacuggugagguagauggauccggugguucuagacuugccaacua

SEQ ID NO: 3859 - RNA, 70 nt, Mus musculus
gccguggccaucuuacugggcagcauuggauagugucugaucucuaauacugccugguaaugaugacggc

SEQ ID NO: 3860 - RNA, 72 nt, Mus musculus
uugguuuaaucucagcuggcaacugugagaugucccuaucauuccucacaguggucucugggauuaugcuaa

SEQ ID NO: 3861 - RNA, 68 nt, Monodelphis domestica
uguagauacugucucuuuccaucagcagcuacaucuggcuacugggucucugauggcaucuuagagcu

SEQ ID NO: 3862 - RNA, 79 nt, Mus musculus
gggccuuucuggagggcccccccucaauccuguugugcucgcuucagaggguuggguggaggcucuccugaaggugucc

SEQ ID NO: 3863 - RNA, 78 nt, Rattus norvegicus
ggaccuuucuggagggcccccccucaauccuguugugcucgcuucagaggguuggguggaggcucuccugaagguguc

SEQ ID NO: 3864 - RNA, 80 nt, Macaca mulatta; identical to SEQ ID NO: 1664

SEQ ID NO: 3865 - RNA, 52 nt, Canis familiaris
uuauaauacaaccugauaaguguuguagcacuuaccagguuguauuguaauu

SEQ ID NO: 3866 - RNA, 82 nt, Mus musculus
ugguauuuaaaagguggauauuccuucuaugguuacgugcuuccuggauaaucauagaggaacauccacuuuuucaguauca

SEQ ID NO: 3867 - RNA, 66 nt, Mus musculus
agggcuccugacuccagguccuguguguuaccucgaaauagcacuggacuuggagucagaaggccu

SEQ ID NO: 3868 - RNA, 65 nt, Rattus norvegicus
gggcuccugacuccagguccuguguguuaccucgaaauagcacuggacuuggagucagaaggccu

SEQ ID NO: 3869 - RNA, 91 nt, Rattus norvegicus
gagagaugcggagcuguuuuugcgauguguuccuaaugugugcuacaauuauauugggaacauuuugcauaaauaguuuuacaucgacaca

SEQ ID NO: 3870 - RNA, 58 nt, Canis familiaris
gugguuaucccuguccuguucguuuuacucaugucgaaucguacagggucauccacuu

SEQ ID NO: 3871 - RNA, 86 nt, Macaca mulatta
cucaugcagugacccucuagauggaagcacugucuguggucuaaaagaaaagaucgugcauccuuuuagaguguuaccguuugaga

SEQ ID NO: 3872 - RNA, 83 nt, Macaca mulatta
ucaggcugugacccuccagagggaagcacuuucuguugucugaaagaaagcaaagcgcuccccuuuagaggauuacgguuuga

SEQ ID NO: 3873 - RNA, 59 nt, Canis familiaris
ucggggaucaucaugucacgagauaccacugugcacuugugacagauugauaacugaaa

SEQ ID NO: 3874 - RNA, 74 nt, Monodelphis domestica
gcagucacccauaaaguagaaagcacuacuaacagcaauguaggguguaguguuuccuacuuuauggaugagug

SEQ ID NO: 3875 - RNA, 72 nt, Macaca mulatta; identical to SEQ ID NO: 1708

SEQ ID NO: 3876 - RNA, 88 nt, Mus musculus
accccuuagaggaugacugauuucuuuugguguucagagucaauagaauuuucuagcaccaucugaaaucgguuauaaugauugggga

SEQ ID NO: 3877 - RNA, 71 nt, Mus musculus
aggaagcugguuucauauggugguuuagauuuaaauagugauugucuagcaccauuugaaaucaguguucu

SEQ ID NO: 3878 - RNA, 81 nt, Mus musculus; identical to SEQ ID NO: 3744

SEQ ID NO: 3879 - RNA, 88 nt, Mus musculus
aucucuuacacaggcugaccgauuucuccugguguucagagucuguuuuugucuagcaccauuugaaaucgguuaugauguaggggga

SEQ ID NO: 3880 - RNA, 88 nt, Rattus norvegicus; identical to SEQ ID NO: 3876

SEQ ID NO: 3881 - RNA, 81 nt, Rattus norvegicus
cuucaggaagcugguuucauauggugguuuagauuuaaauagugauugucuagcaccauuugaaaucaguguucuuggugg

SEQ ID NO: 3882 - RNA, 81 nt, Rattus norvegicus; identical to SEQ ID NO: 3744

SEQ ID NO: 3883 - RNA, 88 nt, Rattus norvegicus; identical to SEQ ID NO: 3879

SEQ ID NO: 3884 - RNA, 81 nt, Ateles geoffroyi; identical to SEQ ID NO: 3743

SEQ ID NO: 3885 - RNA, 81 nt, Lagothrix lagotricha; identical to SEQ ID NO: 3743

SEQ ID NO: 3886 - RNA, 81 nt, Saguinus labiatus; identical to SEQ ID NO: 3744

SEQ ID NO: 3887 - RNA, 81 nt, Macaca mulatta; identical to SEQ ID NO: 3743

SEQ ID NO: 3888 - RNA, 81 nt, Macaca mulatta; identical to SEQ ID NO: 3744

SEQ ID NO: 3889 - RNA, 88 nt, Macaca mulatta; identical to SEQ ID NO: 3879

SEQ ID NO: 3890 - RNA, 81 nt, Macaca nemestrina; identical to SEQ ID NO: 3744

SEQ ID NO: 3891 - RNA, 81 nt, Gorilla gorilla; identical to SEQ ID NO: 3743

SEQ ID NO: 3892 - RNA, 81 nt, Gorilla gorilla; identical to SEQ ID NO: 3744

SEQ ID NO: 3893 - RNA, 81 nt, Pan paniscus; identical to SEQ ID NO: 3743

SEQ ID NO: 3894 - RNA, 81 nt, Pan paniscus; identical to SEQ ID NO: 3744

SEQ ID NO: 3895 - RNA, 81 nt, Pan troglodytes; identical to SEQ ID NO: 3743

SEQ ID NO: 3896 - RNA, 81 nt, Pan troglodytes; identical to SEQ ID NO: 3744

SEQ ID NO: 3897 - RNA, 81 nt, Pongo pygmaeus; identical to SEQ ID NO: 3743

SEQ ID NO: 3898 - RNA, 81 nt, Pongo pygmaeus; identical to SEQ ID NO: 3744

SEQ ID NO: 3899 - RNA, 60 nt, Canis familiaris
acugauuucuuuugguguucagagucaauauaauuuucuagcaccaucugaaaucgguua

SEQ ID NO: 3900 - RNA, 65 nt, Canis familiaris
agcugguuucauauggugguuuagauuuaaauagugauugucuagcaccauuugaaaucaguguu

SEQ ID NO: 3901 - RNA, 66 nt, Canis familiaris
agcugguuucacaugguggcuuagauuuuuccaucuuuguaucuagcaccauuugaaaucaguguu

SEQ ID NO: 3902 - RNA, 58 nt, Canis familiaris
accgauuucuccugguguucagagucuguuuuugucuagcaccauuugaaaucgguua

SEQ ID NO: 3903 - RNA, 64 nt, Monodelphis domestica
augacugauuucuuuugguguucagagucaauaucauuuucuagcaccauuugaaaucgguuau

SEQ ID NO: 3904 - RNA, 86 nt, Monodelphis domestica
gcuucuucaggaagcugguuucauauggugguuuagauuuaacuacugagugucuagcaccauuugaaaucaguguucuuggagga

SEQ ID NO: 3905 - RNA, 89 nt, Gallus gallus
accccuuuagaggaugacugauuucuuuugguguucagagucaauaauauuuucuagcaccauuugaaaucgguuauagugauugggga

SEQ ID NO: 3906 - RNA, 81 nt, Gallus gallus
ccucaggaagcugguuucauauggugguuuagauuuaacuauucauugucuagcaccauuugaaaucaguguucuuggagg

SEQ ID NO: 3907 - RNA, 80 nt, Gallus gallus
ccucuggaagcugguuucacaugguggcuuagauuuucccacuuuguaucuagcaccauuugaaaucaguguucuaggag

SEQ ID NO: 3908 - RNA, 89 nt, Gallus gallus
ucucuuacacaggcugaccgauuucucuugguguucagagucucaguuucugucuagcaccauuugaaaucgguuaugauguaggggga

SEQ ID NO: 3909 - RNA, 87 nt, Xenopus tropicalis
acccuuuuaaaggaugacugauuucuucugguguucagagucuuuuguuuucuagcaccauuugaaaucgguuauaaugauggggua

SEQ ID NO: 3910 - RNA, 80 nt, Xenopus tropicalis
ucccggaagcugguuucuuguggugacuuagauuuauccaucgcugcaucuagcaccauuugaaaucaguguucuaggag

SEQ ID NO: 3911 - RNA, 90 nt, Xenopus tropicalis
ucccuuacacaggaugaccgaucucucuugguguucagaggcucaggucuucaucuagcaccauuugaaaucgguuauaauguaagguga

SEQ ID NO: 3912 - RNA, 75 nt, Xenopus tropicalis
ucaggaggcugguuucauguggugguuuagauuuaacugcacaaugucuagcaccauaugaaaucaguguccuua

SEQ ID NO: 3913 - RNA, 81 nt, Bos taurus; identical to SEQ ID NO: 3744

SEQ ID NO: 3914 - RNA, 88 nt, Bos taurus; identical to SEQ ID NO: 3879

SEQ ID NO: 3915 - RNA, 81 nt, Sus scrofa
cuucaggaagcugguuucauauggugguuuagauuuaaaaagugauugucuagcaccauuugaaaucaguguucuuggggg

SEQ ID NO: 3916 - RNA, 88 nt, Sus scrofa
  misc_feature (83)..(83): n is a, c, g, or u
aucucuuacacaggcugaccgauuucuccugguguucagagucuguuuuugucuagcaccauuugaaaucgguuaugauguangggga

SEQ ID NO: 3917 - RNA, 126 nt, Danio rerio
ugaagacccucaucucucucucucucuccccaccaaacgaugacugauuuccuuuggugcuuagagucccaucugucaucuagcaccauuugaaaucgguuauaaugacuggggaucaauucuuca

SEQ ID NO: 3918 - RNA, 71 nt, Danio rerio
agguugaccgauuucuuuugguguucagagucuuuugggguuucuagcaccauuugaaaucgguuacaaug

SEQ ID NO: 3919 - RNA, 83 nt, Danio rerio
cugcuccuggaagcugaauucagauggugccauagaguauuuuauggcaucuagcaccauuugaaaucaguguuccugggccg

SEQ ID NO: 3920 - RNA, 90 nt, Danio rerio
ucuccuccuggaagcugguuucaagugguguuuuagagugcugaucaaaugaaucuagcaccauuugaaaucaguguucuuggggugaga

SEQ ID NO: 3921 - RNA, 88 nt, Danio rerio
ucuuccuccagaugcugguuucacauggugguuuagauguguucuaccaaagucuagcaccauuugaaaucaguguucuuggggaggg

SEQ ID NO: 3922 - RNA, 71 nt, Fugu rubripes
agguugacugauuucuuuugguguucagaguccaauucuguuucuagcaccauuugaaaucgguuacagug

SEQ ID NO: 3923 - RNA, 126 nt, Fugu rubripes
gaagacagucuuggacucccuuccccguccuccaccaaaagaugacugauuucuucuggugcugagagucggcugcagccuucuagcaccauuugaaaucgguuauaaaacagugggucgauacau

SEQ ID NO: 3924 - RNA, 77 nt, Fugu rubripes
uccagaagcugguuucauguggugguuuagaugugucuucccucuugucuagcaccauuugaaaucaguguucuugg

SEQ ID NO: 3925 - RNA, 74 nt, Fugu rubripes
uggaagcugguuucaggugguggcuuagaguauugucaucuaucuagcaccauuugaaaucaguguucuugggg

SEQ ID NO: 3926 - RNA, 72 nt, Tetraodon nigroviridis
agguugaccgauuucuuuugguguucagaguccaauucuguuucuagcaccauuugaaaucgguuacaguga

SEQ ID NO: 3927 - RNA, 100 nt, Tetraodon nigroviridis
uguuucuccaccaaaagaugacugauuuccucuggugcuuagagccgccugcagccuucuagcaccauuugaaaucgguuauaaaacuguggaucagugc

SEQ ID NO: 3928 - RNA, 79 nt, Tetraodon nigroviridis
cuccagaagcugguuucacguggugguuuagaugugucuccucaucgucuagcaccauuugaaaucaguguucuugggg

SEQ ID NO: 3929 - RNA, 78 nt, Tetraodon nigroviridis
cucuuggaagcugguuucaggugguggcuuagaguauugucaucuaucuagcaccauuugaaaucaguguucuugggg

SEQ ID NO: 3930 - RNA, 96 nt, Mus musculus
cuaagccaaguuucaguucauguaaacauccuacacucagcugucauacaugcguuggcugggauguggauguuuacgucagcugucuuggaguau

SEQ ID NO: 3931 - RNA, 89 nt, Mus musculus
accauguuguaguguguguaaacauccuacacucucagcugugagcucaagguggcugggagaggguuguuuacuccuucugccaugga

SEQ ID NO: 3932 - RNA, 84 nt, Mus musculus
gagugacagauauuguaaacauccuacacucucagcugugaaaaguaagaaagcugggagaaggcuguuuacucucucugccuu

SEQ ID NO: 3933 - RNA, 82 nt, Mus musculus; identical to SEQ ID NO: 1919

SEQ ID NO: 3934 - RNA, 87 nt, Rattus norvegicus
ccgaguuucaguucauguaaacauccuacacucagcugucauacaugaguuggcugggauguggauguuuacgucagcugucuugga

SEQ ID NO: 3935 - RNA, 89 nt, Rattus norvegicus; identical to SEQ ID NO: 3931

SEQ ID NO: 3936 - RNA, 84 nt, Rattus norvegicus
gagugacagauacuguaaacauccuacacucucagcugugaaaaguaagaaagcugggagaaggcuguuuacucucucugccuu

SEQ ID NO: 3937 - RNA, 88 nt, Ateles geoffroyi
accgaguuucaguucauguaaacauccuacacucagcuguaauacauggauuggcugagagguggauguuuacuucagcugacuugga

SEQ ID NO: 3938 - RNA, 88 nt, Lagothrix lagotricha; identical to SEQ ID NO: 3937

SEQ ID NO: 3939 - RNA, 72 nt, Lagothrix lagotricha
agauacuguaaacauccuacacucucagcuguggaaaguaagaaagcugggagaaggcuguuuacucuuucu

SEQ ID NO: 3940 - RNA, 88 nt, Macaca mulatta; identical to SEQ ID NO: 3745

SEQ ID NO: 3941 - RNA, 89 nt, Macaca mulatta
accaugcuguaguguguguaaacauccuacacucucagcugugagcucaagguggcugggagaggguuguuuacuccuucugccaugga

SEQ ID NO: 3942 - RNA, 72 nt, Macaca mulatta
agauacuguaaacauccuacacucucagcuguggaaaguaagaaagcugggagaaggcuguuuacucucucu

SEQ ID NO: 3943 - RNA, 69 nt, Macaca mulatta
uuguuguaaacauccccgacuggaagcuguaagacacagcuaagcuuucagucagauguuugcugcuac

SEQ ID NO: 3944 - RNA, 92 nt, Macaca mulatta
gggcagucuucgcuacuguaaacauccuugacuggaagcuguaagguguucagaggagcuuucagucggauguuuacagcggcaggcugcca

SEQ ID NO: 3945 - RNA, 88 nt, Macaca nemestrina; identical to SEQ ID NO: 3745

SEQ ID NO: 3946 - RNA, 72 nt, Macaca nemestrina; identical to SEQ ID NO: 3939

SEQ ID NO: 3947 - RNA, 70 nt, Macaca nemestrina; identical to SEQ ID NO: 3092

SEQ ID NO: 3948 - RNA, 88 nt, Gorilla gorilla
accaaguuccaguucauguaaacauccuacacucagcuguaauacauggauuggcugggagguggauguuuacuucagcugacuugga

SEQ ID NO: 3949 - RNA, 70 nt, Gorilla gorilla; identical to SEQ ID NO: 3092

SEQ ID NO: 3950 - RNA, 88 nt, Pan paniscus; identical to SEQ ID NO: 3745

SEQ ID NO: 3951 - RNA, 70 nt, Pan paniscus; identical to SEQ ID NO: 3092

SEQ ID NO: 3952 - RNA, 88 nt, Pan troglodytes; identical to SEQ ID NO: 3745

SEQ ID NO: 3953 - RNA, 72 nt, Pan troglodytes; identical to SEQ ID NO: 3939

SEQ ID NO: 3954 - RNA, 70 nt, Pan troglodytes; identical to SEQ ID NO: 3092

SEQ ID NO: 3955 - RNA, 63 nt, Canis familiaris
uguaaacauccucgacuggaagcugugaagccacagaugggcuuucagucggauguuugcagc

SEQ ID NO: 3956 - RNA, 60 nt, Canis familiaris
uguaaacauccuacacucagcuguaguacauggauuggcugggagguggauguuuacuuc

SEQ ID NO: 3957 - RNA, 61 nt, Canis familiaris
uguaaacauccuacacucucagcugugagcucaagguggcugggagaggguuguuuacucc

SEQ ID NO: 3958 - RNA, 62 nt, Canis familiaris
uguaaacauccuacacucucagcuguggaaaguaagaaagcugggagaaggcuguuuacucu

SEQ ID NO: 3959 - RNA, 60 nt, Canis familiaris
uguaaacauccccgacuggaagcuggaagacagcaaagcuuucagucagauguuugcugc

SEQ ID NO: 3960 - RNA, 72 nt, Monodelphis domestica
gcggcuguaaacauccucgacuggaagcugugaagcagcagauggggcuuucagucggauguuugcagcugc

SEQ ID NO: 3961 - RNA, 87 nt, Gallus gallus
cuaacuuuuaguuccuguaaacauccuacacucagcuauaacaagugguagggcugggggguggauguuuacuucaacugacuugga

SEQ ID NO: 3962 - RNA, 89 nt, Gallus gallus
accaugcuguagcacguguaaacauccuacacucucagcugugaacucgagguggcugggagaggauuguuuacgccuucugccaugga

SEQ ID NO: 3963 - RNA, 72 nt, Gallus gallus
agguacuguaaacauccuacacucucagcuguggaaacuaagaaagcugggagaaggcuguuuacucucccu

SEQ ID NO: 3964 - RNA, 64 nt, Gallus gallus
guugcuguaaacauccccgacuggaagcuguagcagcuugagcuuucagucagauguuugcugc

SEQ ID NO: 3965 - RNA, 96 nt, Gallus gallus
cggggcagucaucgcugcuguaaacauccuugacuggaagcugugaggugucagcgggggcuuucagucggauguuuacagcugcaggcugcugca

SEQ ID NO: 3966 - RNA, 80 nt, Xenopus tropicalis
guauuagucuauguaaacauccuacacucagcucguauguauaaccugacugggugggggguguuugccucgacugaucu

SEQ ID NO: 3967 - RNA, 89 nt, Xenopus tropicalis
accaugcagcagugauuguaaacauccuacacucucagcugugaacauaagguggcugggagaaggguguuuacucccccugccaugga

SEQ ID NO: 3968 - RNA, 78 nt, Xenopus tropicalis
gagagacagauacuguaaacauccuacacucucagcuguggaaauacaaagcugggggaaggcuguuuacucucucug

SEQ ID NO: 3969 - RNA, 81 nt, Xenopus tropicalis
aguuugucgcuguaaacauccccgacuggaagcugugaggcugcauuugagcuuucagucugguguuugcugcuaccggcu

SEQ ID NO: 3970 - RNA, 90 nt, Xenopus tropicalis
gggcaguuacagccucuguaaacauccuugacuggaagcugugaaauaaugauaguagcuuucagucggauguuuacagcugcuagcugc

SEQ ID NO: 3971 - RNA, 67 nt, Bos taurus
cuguaaacauccucgacuggaagcugugaggcugcagaaaggcuuucagucggauguuugcagcugc

SEQ ID NO: 3972 - RNA, 88 nt, Bos taurus
ccaaguuuucaguucauguaaacauccuacacucagcuguaacacacgagucggcugggagguggauguuuacuucagcugacuugga

SEQ ID NO: 3973 - RNA, 105 nt, Bos taurus
cagacuguaaccaugccguaguguguguaaacauccuacacucucagcugugagcucgagguggcugggagaggguuguuuacuccuucugccauggaaaacguc

SEQ ID NO: 3974 - RNA, 70 nt, Bos taurus
guuguuguaaacauccccgacuggaagcuguaccacacagcuaagcuuucagucagauguuugcugcuac

SEQ ID NO: 3975 - RNA, 92 nt, Bos taurus
gggcagucuuugcuacuguaaacauccuugacuggaagcuguaaggcguugcaaggagcuuucagucggauguuuacagcggcaggcugcca

SEQ ID NO: 3976 - RNA, 80 nt, Sus scrofa
gacagauacuguaaacauccuacacucucagcuguggaaaguaagaaagcugggagaaggcuguuuacucucucugccuu

SEQ ID NO: 3977 - RNA, 89 nt, Danio rerio
ggcuccuugcaguuguaaacauucccgacuggaaguuguaaugcagaaaaucucagcuuucagucugauguuugcugcuacugguggcc

SEQ ID NO: 3978 - RNA, 88 nt, Danio rerio
uuccaguguagucgcuguaaacauccuacacucagcugugagcugcagacgaggcugggcggaggguguuugcugugacugucuggag

SEQ ID NO: 3979 - RNA, 79 nt, Danio rerio
cuucagggaguguaaacauccuacacucucagcuggagcgcagccgaggccgggagugggauguuugcgcucucuggcu

SEQ ID NO: 3980 - RNA, 128 nt, Danio rerio
gugcuguauauggguauaacugguuguucaugccuguaaacauccccgacuggaagcugugcuacgcggaaaacgagcuuucaguuggauguuugcugucaucguccaguucugucgccuuguauuac

SEQ ID NO: 3981 - RNA, 90 nt, Fugu rubripes
uuccggcucaguugguguaaacauccuacacucagcugugauccuuugcggcagaggcugagagaagguuguuuacuugaacuggcugga

SEQ ID NO: 3982 - RNA, 78 nt, Fugu rubripes
ucaggaaguguaaacauccuacacucucggcguccgcccccugguggccgggggugggacuguuugcacugccugacu

SEQ ID NO: 3983 - RNA, 98 nt, Fugu rubripes
ugcacauggcaguuugaggcuguaaacauccccgacuggaagcugucacucagaagagcuuucagucugauguuuaccaccuccgaccgccuccugcu

SEQ ID NO: 3984 - RNA, 81 nt, Tetraodon nigroviridis
agaugguguaaacauccuacacucagcugugaucuuuugccgcagaggcugagagaagguuguuuacuugaacuggcugga

SEQ ID NO: 3985 - RNA, 79 nt, Tetraodon nigroviridis
uucagggaguguaaacauccuacacucucggcguccgcccccugguggccgggggugggacuguuugcacugccuggcu

SEQ ID NO: 3986 - RNA, 86 nt, Tetraodon nigroviridis
uggcaguuugaggcuguaaacauccccgacuggaagcugucacucagcagagcuuucagucugauguuuacccccuccgaccgccu

SEQ ID NO: 3987 - RNA, 81 nt, Lagothrix lagotricha; identical to SEQ ID NO: 3746

SEQ ID NO: 3988 - RNA, 81 nt, Saguinus labiatus; identical to SEQ ID NO: 3746

SEQ ID NO: 3989 - RNA, 81 nt, Macaca mulatta; identical to SEQ ID NO: 3746

SEQ ID NO: 3990 - RNA, 81 nt, Macaca mulatta; identical to SEQ ID NO: 3747

SEQ ID NO: 3991 - RNA, 81 nt, Macaca nemestrina; identical to SEQ ID NO: 3746

SEQ ID NO: 3992 - RNA, 81 nt, Gorilla gorilla; identical to SEQ ID NO: 3746

SEQ ID NO: 3993 - RNA, 81 nt, Pan paniscus; identical to SEQ ID NO: 3746

SEQ ID NO: 3994 - RNA, 81 nt, Pan troglodytes; identical to SEQ ID NO: 3747

SEQ ID NO: 3995 - RNA, 81 nt, Pongo pygmaeus; identical to SEQ ID NO: 3746

SEQ ID NO: 3996 - RNA, 81 nt, Sus scrofa
ugugcaucguagucaaaugcucagacuccugugguggcugcucaugcaccacggauguuugagcaugugcuacggugucua

SEQ ID NO: 3997 - RNA, 80 nt, Sus scrofa
ugugcaucguggucaaaugcucagacuccuugguggcugcuuaugcaccacggauguuugagcaugugcuauggugucua

SEQ ID NO: 3998 - RNA, 107 nt, Ateles geoffroyi
aucaagaucagaggcucugcccuccguguucacagcggaccuugauuuaaugucauacaauuaaggcacgcggugaaugccaagagcggagccuacggcugcacuug

SEQ ID NO: 3999 - RNA, 107 nt, Lagothrix lagotricha
aucaagaucagaggcucugcccuccguguucacagcggaccuugauuuaaugucauacaauuaaggcacgcggugaaugccaagagcggagccuacgacugcacuug

SEQ ID NO: 4000 - RNA, 109 nt, Macaca mulatta
aucaagaucagaggcucugcccuccguguucacagcggaccuugauuuaaugucauacaauuaaggcacgcggugaaugccaagagcggagccuacggcugcacuugaa

SEQ ID NO: 4001 - RNA, 85 nt, Macaca mulatta; identical to SEQ ID NO: 3748

SEQ ID NO: 4002 - RNA, 109 nt, Gorilla gorilla; identical to SEQ ID NO: 3749

SEQ ID NO: 4003 - RNA, 109 nt, Pan paniscus; identical to SEQ ID NO: 3749

SEQ ID NO: 4004 - RNA, 109 nt, Pan troglodytes; identical to SEQ ID NO: 3749

SEQ ID NO: 4005 - RNA, 109 nt, Pongo pygmaeus
aucaagauuagaggcucugcccuccguguucacagcggaccuugauuuaaugucauacaauuaaggcacgcggugaaugccaagagcggagccuacggcugcacuugaa

SEQ ID NO: 4006 - RNA, 85 nt, Monodelphis domestica; identical to SEQ ID NO: 3748

SEQ ID NO: 4007 - RNA, 93 nt, Monodelphis domestica
aucagagacucugucucuccguguucacagcggaccuugauuuaaugucauacaauuaaggcacgcggugaaugccaagagcggagccugaaa

SEQ ID NO: 4008 - RNA, 68 nt, Monodelphis domestica
cucugcguguucacagcggaccuugauuuaaugucuauacaauuaaggcacgcggugaaugccaagag

SEQ ID NO: 4009 - RNA, 96 nt, Gallus gallus
aggcucugccucuccguguucacagcggaccuugauuuaaugucauacaauuaaggcacgcggugaaugccaagagcggauccuccaggcggcauu

SEQ ID NO: 4010 - RNA, 93 nt, Gallus gallus
agccccagcguuuuguguucacugcagaccuugauuuaaugucacacgauuaaggcacgcagugaaugccaaaguuuggggcagccugggcug

SEQ ID NO: 4011 - RNA, 93 nt, Gallus gallus; identical to SEQ ID NO: 4010

SEQ ID NO: 4012 - RNA, 88 nt, Xenopus tropicalis
uaagucucugacucuccguguucacagcggaccuugauuuaaugucauacaauuaaggcacgcggugaaugccaagaguggagccuac

SEQ ID NO: 4013 - RNA, 85 nt, Bos taurus; identical to SEQ ID NO: 3748

SEQ ID NO: 4014 - RNA, 85 nt, Sus scrofa
aggccucucucuccguguucacagcggaccuugaguuaaauguccauacaauuaaggcacgcggugaaugccaagaauggggcug

SEQ ID NO: 4015 - RNA, 65 nt, Mus musculus
cccugucucccaacccuuguaccagugcugugccucagacccugguacaggccugggggauaggg

SEQ ID NO: 4016 - RNA, 85 nt, Rattus norvegicus
cuucucaaggcccugucucccaacccuuguaccagugcugugccucagacccugguacaggccugggggacagggacuuggggac

SEQ ID NO: 4017 - RNA, 84 nt, Macaca mulatta; identical to SEQ ID NO: 3751

SEQ ID NO: 4018 - RNA, 57 nt, Canis familiaris
ucucccaacccuuguaccagugcugugccucagucccugguacaggcauggggggca

SEQ ID NO: 4019 - RNA, 64 nt, Xenopus tropicalis
cucucucccaacccuuguaccagagugauaaugggaacucugguacagaggauggcugaaagga

SEQ ID NO: 4020 - RNA, 100 nt, Bos taurus
ccucucuccucacggcccugucucccaacccuuguaccagugugugucucagacccugguacagguacggggaggcagggaccugggggaucccagcagc

SEQ ID NO: 4021 - RNA, 79 nt, Danio rerio
caucuccgucucucccaauccuuguaccagugucugauuuacagaugacgcuggacgggguuuggggggggcugaggga

SEQ ID NO: 4022 - RNA, 66 nt, Mus musculus
gaagauagguuauccguguugccuucgcuuuauucgugacgaaucauacacgguugaccuauuuuu

SEQ ID NO: 4023 - RNA, 84 nt, Rattus norvegicus
gcggugcuugaagauagguuauccguguugccuucgcuuuauucgugacgaaucauacacgguugaccuauuuuucaguaccaa

SEQ ID NO: 4024 - RNA, 84 nt, Macaca mulatta
gagguacuugaagauagguuauccguguugccuucgcuuuauuugugacgaaucauacacgguugaccuauuuuucaguaccaa

SEQ ID NO: 4025 - RNA, 84 nt, Macaca nemestrina; identical to SEQ ID NO: 4024

SEQ ID NO: 4026 - RNA, 84 nt, Gorilla gorilla; identical to SEQ ID NO: 3752

SEQ ID NO: 4027 - RNA, 84 nt, Pan paniscus; identical to SEQ ID NO: 3752

SEQ ID NO: 4028 - RNA, 84 nt, Pan troglodytes; identical to SEQ ID NO: 3752

SEQ ID NO: 4029 - RNA, 84 nt, Pongo pygmaeus; identical to SEQ ID NO: 3752

SEQ ID NO: 4030 - RNA, 61 nt, Bos taurus
aagaugguugaccauagaacaugcgcugucucuaugucguauguaaugugguccacgucuu

SEQ ID NO: 4031 - RNA, 70 nt, Mus musculus
cucagaucagaaggugacuguggcuuuggguggauauuaaucagccacagcacugccuggucagaaagag

SEQ ID NO: 4032 - RNA, 74 nt, Rattus norvegicus
uccucagaucagaaggugacuguggcuuuggguggauauuaaucagccacagcacugccuggucagaaagagca

SEQ ID NO: 4033 - RNA, 73 nt, Macaca mulatta; identical to SEQ ID NO: 3754

SEQ ID NO: 4034 - RNA, 62 nt, Canis familiaris
agaucagaaggugauuguggcuuuggguggauauuaaucagccacagcacugccuggucaga

SEQ ID NO: 4035 - RNA, 70 nt, Monodelphis domestica
cucagaucagaaggugauuguggcuuucgguagacauggaacagccacaucacuggcuggucagaaagag

SEQ ID NO: 4036 - RNA, 73 nt, Gallus gallus
cuccucagaucagaaggugauuguggcuuuggguaaauauugagcagccacagcacugccuggucagaaagag

SEQ ID NO: 4037 - RNA, 73 nt, Xenopus tropicalis
cuccucagaucagaaggugauuguggcuuuuaguagauauuaagcagccacagcacugccuggucagaaagag

SEQ ID NO: 4038 - RNA, 82 nt, Mus musculus
ugguacuuggagagauaguagaccguauagcguacgcuuuaucugugacguauguaacacgguccacuaacccucaguauca

SEQ ID NO: 4039 - RNA, 76 nt, Rattus norvegicus
cuuggagagauaguagaccguauagcguacgcuuuaucugugacguauguaacacgguccacuaacccucaguauc

SEQ ID NO: 4040 - RNA, 82 nt, Macaca mulatta; identical to SEQ ID NO: 4038

SEQ ID NO: 4041 - RNA, 109 nt, Mus musculus
acuugugaggaaauaaaggaaguuaggcugaggggcagagagcgagacuuuucuauuuuccaaaagcucggucugaggccccucagucuugcuuccuaccccgcgcuug

SEQ ID NO: 4042 - RNA, 79 nt, Rattus norvegicus
gaaguuaggcugaggggcagagagcgagacuuuucuauuuuccaaaagcucggucugaggccccucagucuugcuuccu

SEQ ID NO: 4043 - RNA, 94 nt, Macaca mulatta
auaaaggaaguuaggcugaggggcagagagcgagacuuuucuauuuuccaaaagcucggucugaggccccucagucuugcuuccuaccccgcgc

SEQ ID NO: 4044 - RNA, 124 nt, Mus musculus
ugcccggggagaaguacggugagccugucauuauucagagaggcuagauccucuguguugagaaggaucaugaugggcuccucgguguucuccagguagcggcaccacaccaugaaggcagccc

SEQ ID NO: 4045 - RNA, 93 nt, Rattus norvegicus; identical to SEQ ID NO: 3757

SEQ ID NO: 4046 - RNA, 93 nt, Macaca mulatta
ccagggagaaguacggugagccugucauuauucagagaggcuagauccucuguguugagaaggaucaugaugggcuccucgguguucuccagg

SEQ ID NO: 4047 - RNA, 74 nt, Canis familiaris
uacggugagccugucauuauucagagaggcuagauccucuguguugagaaggaucaugaugggcuccucggugu

SEQ ID NO: 4048 - RNA, 115 nt, Macaca mulatta
ucuguuuaucaccagauccuagaacccuaucaauauugucucugcuguguaaauaguucugaguagugcaauauugcuuauaggguuuugguguuugggaagaacaaugggcagg

SEQ ID NO: 4049 - RNA, 124 nt, Danio rerio
uugcaggucguuuaagaauuaauccuaauucuugggacccuaucaguauugccucugcuguccacuguguucagaguagugcaauauugcuaauaggguuuuagguuuuagguuguaccuucag

SEQ ID NO: 4050 - RNA, 116 nt, Danio rerio
gauaaaugcaucuugcaggcgagacccuaucaauauugccucugcuuuucucacuguuuauggaguagugcaauauugcuuauagggucuugacuuuaaggcuaaucugcaauauc

SEQ ID NO: 4051 - RNA, 109 nt, Mus musculus
cuucugcucugcucauccucucuaauccuuugucccugggugaaaaugcuauuuguaugcaaugcacccgggcaaggauuuggggaaggugagccugaucugcauggag

SEQ ID NO: 4052 - RNA, 84 nt, Rattus norvegicus
gcucguccucucuaauccuuugucccugggugaaaaugcuauuuguaugcaaugcacccgggcaaggauuuggggaagguaagc

SEQ ID NO: 4053 - RNA, 84 nt, Macaca mulatta
gcucuuccucucuaauccuuugucccugggugagagugcuuucugaaugcagugcacccaggcaaggauucugagagggugagc

SEQ ID NO: 4054 - RNA, 79 nt, Mus musculus
uccuguugggagacccuggucugcacucuaucuguaaacuuacugaagggagagcagggcaggguuucccauacagagg

SEQ ID NO: 4055 - RNA, 83 nt, Macaca mulatta
gcugcuguugggagacccuggucugcacucuaucuguauucuuacugaagggagcgcagggcaggguuucccauacagagggc

SEQ ID NO: 4056 - RNA, 109 nt, Macaca mulatta
ugucuagugccguuauguguagugccuuauucaggaagguguuacuuaauauauuaauauuuguaaggcacccuucugaguagaguaaugugcaacauggacaucauuu

SEQ ID NO: 4057 - RNA, 109 nt, Pygathrix bieti
ugucuagugccuuuauguguagugccuuauucaggaagguguuacuuaauguauuaacauuuguaaggcacccuucugaguagaguaaugugcaacauggauaucauuu

SEQ ID NO: 4058 - RNA, 93 nt, Pan troglodytes
ccauacuauguguagugccuuauucaggaagguguuacuuaauagauuaauauuuguaaggcacccuucugaguagaguaaugugcaacaugg

SEQ ID NO: 4059 - RNA, 93 nt, Symphalangus syndactylus
ccaugcuauguguagugccuuauucaggaagguguuacuuaauagauuaauauuuguaaggcacccuucugaguagaguaaugugcaacaugg

SEQ ID NO: 4060 - RNA, 94 nt, Macaca mulatta
gugcuguguguagugcuucacuucaauaagugccauucaugugucuagaaauauguuuugcaccuuuuggagugaaauaaugcacaacagguac

SEQ ID NO: 4061 - RNA, 94 nt, Pygathrix bieti; identical to SEQ ID NO: 4060

SEQ ID NO: 4062 - RNA, 94 nt, Pan troglodytes; identical to SEQ ID NO: 3762

SEQ ID NO: 4063 - RNA, 94 nt, Symphalangus syndactylus; identical to SEQ ID NO: 4060

SEQ ID NO: 4064 - RNA, 85 nt, Pan troglodytes
ugaguguagugcccuacuccagagggcaucagucauguaaacuaaaacaugauuguagccuuuuugaguagaguaauacacauca

SEQ ID NO: 4065 - RNA, 85 nt, Symphalangus syndactylus
ugaguguagugcccuacuccagagggcgucacucacguaaacuaacacaugauuguagcccuuuugaguagaguaauacacauca

SEQ ID NO: 4066 - RNA, 84 nt, Macaca mulatta
ucucacucuguggcacucagccucgggggcacuuucuggugucagaaugaaagugcugucauugcugagauccaaugacugagg

SEQ ID NO: 4067 - RNA, 98 nt, Macaca mulatta
gguacuucucacucuguggcacucagccucgggggcacuuucuggugucagaaugaaagugcugucauugcugagauccaaugacugaggcgagcacc

SEQ ID NO: 4068 - RNA, 95 nt, Macaca mulatta
agugaaauugcugggucauauggucagucuacuuucagaguaauugugaaaguauuuuucaaaguagcuguaccauuugcauucccuguggcaau

SEQ ID NO: 4069 - RNA, 97 nt, Macaca mulatta
uacuuacucuacaugugugucacuugacgaccacugugaagagaguaaaauguacagugguucucuuggggcucaagcguaacguagagugcugguc

SEQ ID NO: 4070 - RNA, 82 nt, Macaca mulatta
cccuagcuugguucuaaaucccacggugccuucuccuugggaaaaacagagaaggcacugugggauuuagaaccaaguuagg

SEQ ID NO: 4071 - RNA, 96 nt, Macaca mulatta
gugacccugggcaaguuccugaagaucaaacacaucagaucccuuaucuguaaaaugggcaugauccaggaaccugccucuaugguugccuuggag

SEQ ID NO: 4072 - RNA, 110 nt, Macaca mulatta
gcuuuuauauuguagguuuuugcucaugcaccaugguugucugagcaugcagcaugcuugucugcucauaccccaugguuucugagcaggaaucuucauugucuacugcu

SEQ ID NO: 4073 - RNA, 98 nt, Macaca mulatta; identical to SEQ ID NO: 3778

SEQ ID NO: 4074 - RNA, 94 nt, Macaca mulatta
guucuguuauuugcaaucaguaacaaagauucauccuuguguccaucaugcagcaaggagaaucuuugucacuuaguguaauuaauagcuggac

SEQ ID NO: 4075 - RNA, 88 nt, Homo sapiens; identical to SEQ ID NO: 3879

SEQ ID NO: 4076 - RNA, 89 nt, Homo sapiens; identical to SEQ ID NO: 3941

SEQ ID NO: 4077 - RNA, 72 nt, Homo sapiens; identical to SEQ ID NO: 3939

SEQ ID NO: 4078 - RNA, 88 nt, Mus musculus
uguuaaaucaggaauuguaaacaauuccuaggcaauguguauaauguugguaagucauuccuagaaauuguucacaaugccuguaaca

SEQ ID NO: 4079 - RNA, 83 nt, Rattus norvegicus
aaucaggaauuguaaacaauuccuaggcaauguguauaauguugguaagucauuccuagaaauuguucacaaugccuguaaca

SEQ ID NO: 4080 - RNA, 79 nt, Homo sapiens
agcaaagaaguguguugcccucuaggaaauguguguugcucugauguaauuagguugacauacguuucccugguagcca

SEQ ID NO: 4081 - RNA, 82 nt, Homo sapiens
ggccugcccgacacucuuucccuguugcacuacuauaggccgcugggaagcagugcaaugaugaaagggcaucggucagguc

SEQ ID NO: 4082 - RNA, 86 nt, Homo sapiens
acugcuaacgaaugcucugacuuuauugcacuacuguacuuuacagcuagcagugcaauaguauugucaaagcaucugaaagcagg

SEQ ID NO: 4083 - RNA, 78 nt, Homo sapiens
gccgcaggugcucugacgagguugcacuacugugcucugagaagcagugcaaugauauugucaaagcaucugggacca

SEQ ID NO: 4084 - RNA, 64 nt, Mus musculus
gagcucuuuucacauugugcuacugucuaacguguaccgagcagugcaauguuaaaagggcauc

SEQ ID NO: 4085 - RNA, 82 nt, Mus musculus
ggcuuguuggacacucuuucccuguugcacuacugugggccucugggaagcagugcaaugaugaaagggcaucugucgggcc

SEQ ID NO: 4086 - RNA, 86 nt, Mus musculus
ccugcuaacggcugcucugacuuuauugcacuacuguacuuuacagcgagcagugcaauaguauugucaaagcauccgcgagcagg

SEQ ID NO: 4087 - RNA, 97 nt, Mus musculus
uuuccugcuggcugcgggugcucugacuagguugcacuacugugcugugagaagcagugcaaugguauugucaaagcaucugggaccagccucgaag

SEQ ID NO: 4088 - RNA, 88 nt, Mus musculus
ggaagacagugcaauuaaaagggggaaaaaaguaccugggauguucugagaauuucauuuuucuuguuauugccacuccugcuuggaa

SEQ ID NO: 4089 - RNA, 88 nt, Rattus norvegicus
ugcugcuggccggagcucuuuucacauugugcuacugucuacacguguaccgagcagugcaauguuaaaagggcaucggccuuguagu

SEQ ID NO: 4090 - RNA, 82 nt, Rattus norvegicus
ggcuugcuggacacucuuucccuguugcacuacugugggccucugggaagcagugcaaugaugaaagggcauccgucaggcc

SEQ ID NO: 4091 - RNA, 100 nt, Rattus norvegicus
ccugcuggcuacugcugacgacugcucugacuuuauugcacuacuguacuguacagcuagcagugcaauaguauugucaaagcauccgggagcaggcuac

SEQ ID NO: 4092 - RNA, 78 nt, Rattus norvegicus
gcugcgggugcucugacuagguugcacuacugugcuguggaaagcagugcaaugguauugucaaagcaucugggacca

SEQ ID NO: 4093 - RNA, 89 nt, Macaca mulatta
ugcugcuggccagagcucuuuucacauugugcuacugucugcaccugucacuagcagugcaauguuaaaagggcauuggccccccagua

SEQ ID NO: 4094 - RNA, 82 nt, Macaca mulatta
ggccugcccgacacucuuucccuguugcacuacugugggccacugggaagcagugcaaugaugaaagggcaucggucagguc

SEQ ID NO: 4095 - RNA, 86 nt, Macaca mulatta; identical to SEQ ID NO: 4082

SEQ ID NO: 4096 - RNA, 77 nt, Macaca mulatta
ccgcaggugcucugacgagguugcacuacugugcucugagaagcagugcaaugauauugucaaagcaucugggacca

SEQ ID NO: 4097 - RNA, 89 nt, Macaca nemestrina; identical to SEQ ID NO: 3311

SEQ ID NO: 4098 - RNA, 89 nt, Gorilla gorilla; identical to SEQ ID NO: 3311

SEQ ID NO: 4099 - RNA, 89 nt, Pan paniscus; identical to SEQ ID NO: 3311

SEQ ID NO: 4100 - RNA, 62 nt, Canis familiaris
gcucuuuucacauugugcuacugucugcaccuaccacuagcagugcaauguuaaaagggcau

SEQ ID NO: 4101 - RNA, 60 nt, Canis familiaris
acucuuucccuguugcacuacugugggccgcugggaagcagugcaaugaugaaagggcau

SEQ ID NO: 4102 - RNA, 76 nt, Monodelphis domestica
uggccagagcucuuuucacauugugcuacugucugcaccuaucacuagcagugcaauguaaaaagggcauuggcug

SEQ ID NO: 4103 - RNA, 83 nt, Gallus gallus
ugcuguuguccagagcccuuuuucuguuguacuacuggcaauuaugaugagcagugcaauauuaaaagggcauuggcuggcag

SEQ ID NO: 4104 - RNA, 77 nt, Gallus gallus
gggcgggcugccccucuuucccuguugcacuacugucacggucgcagcgagcagugcaauaaugaaagggcgucagu

SEQ ID NO: 4105 - RNA, 93 nt, Gallus gallus
uggcugcugguaucgcuggcucugacaauguugcacuacugucugcacaaauaaagcagugcaauaauauugucaaagcauuugguuccaguc

SEQ ID NO: 4106 - RNA, 83 nt, Xenopus tropicalis
cuguccagugcccuuuuuauguuguacuacuaguggucacacacaaaaaaagcagugcaauguuaaaagggcauuggccaggg

SEQ ID NO: 4107 - RNA, 76 nt, Xenopus tropicalis
ccgccugacacucuuucccuguugcacuacuguggcagugaauaaagcagugcaaugaugaaagggcaucagucug

SEQ ID NO: 4108 - RNA, 71 nt, Xenopus tropicalis
auccguggcccuuuuucuguuguacuacuggaauuuguaauuagcagugcaauauuaaaagggcauuggcu

SEQ ID NO: 4109 - RNA, 84 nt, Xenopus tropicalis
cugcuaaugugugcucugacuuuauugcacuacuguacuauacagcuagcagugcaauaguauugucaaagcaucugcaagcag

SEQ ID NO: 4110 - RNA, 73 nt, Xenopus tropicalis
gaauugcucugacaguguugcacuacugugaucucaaaugaagcagugcaauaguauugucaaagcauuucau

SEQ ID NO: 4111 - RNA, 85 nt, Danio rerio
ugucuguccagugccccuuuuauauuguacuacugauaacccaguuauuaaagcagugcaauguuaaaagggcauuggccaggga

SEQ ID NO: 4112 - RNA, 85 nt, Danio rerio; identical to SEQ ID NO: 4111

SEQ ID NO: 4113 - RNA, 84 nt, Danio rerio
cuguugccugacacucuuucccuguugcacuacugugggagcugcagcaaagcagugcaauaaugaaagggcaucaguccacug

SEQ ID NO: 4114 - RNA, 141 nt, Danio rerio
gggagaggucuguacggugauauugaccauguuuuguccauugcccuuuuucuguuguacuacuggccaaucagaagagcagugcaauauuaaaagggcauuggcugauagaacagaguccuucaccucucacccucuccu

SEQ ID NO: 4115 - RNA, 81 nt, Danio rerio
uuguugaccagggcccuuuuucuguuguacuacugugcagucagaugagcagugcaauauuaaaagggcauuggcugacaa

SEQ ID NO: 4116 - RNA, 86 nt, Danio rerio
gcuguuaacaggugcucugacuucauugcacuacuguauuggacagcuagcagugcaauaguauugucaaagcgucugagagcagc

SEQ ID NO: 4117 - RNA, 86 nt, Danio rerio; identical to SEQ ID NO: 4116

SEQ ID NO: 4118 - RNA, 81 nt, Danio rerio
aaggucuguugcuuugacgauguugcacuacugaaccaucuaaucaagcagugcaauaguauugucauugcauucggcuuu

SEQ ID NO: 4119 - RNA, 83 nt, Danio rerio
ugaggucagcugcucugacgauguugcacuacuguaccauccauucuagcagugcaauaguauugucauagcauuuagccucu

SEQ ID NO: 4120 - RNA, 79 nt, Fugu rubripes
uguuguuguccucugcccuuuuucuguugcaccacuggacacugagaugagcagugcaauauuaaaagggcauuggcug

SEQ ID NO: 4121 - RNA, 68 nt, Fugu rubripes
cagcugcuuugacaauguugcacuacuguaccauccauucuagcagugcaauaguauugucauagcau

SEQ ID NO: 4122 - RNA, 74 nt, Tetraodon nigroviridis
uguuguccucugcccuuuuucuguugcaccacuggacacugagaugagcagugcaauauuaaaagggcauuggc

SEQ ID NO: 4123 - RNA, 79 nt, Tetraodon nigroviridis
aggucagcugcucugacaauguugcacuacuguaccauccauucuagcagugcaauaguauugucauagcauuuggccu

SEQ ID NO: 4124 - RNA, 85 nt, Mus musculus; identical to SEQ ID NO: 3748

SEQ ID NO: 4125 - RNA, 109 nt, Mus musculus
aucaagaucagagacucugcucuccguguucacagcggaccuugauuuaaugucauacaauuaaggcacgcggugaaugccaagagcggagccuacggcugcacuugaa

SEQ ID NO: 4126 - RNA, 68 nt, Mus musculus; identical to SEQ ID NO: 4008

SEQ ID NO: 4127 - RNA, 85 nt, Rattus norvegicus; identical to SEQ ID NO: 3748

SEQ ID NO: 4128 - RNA, 109 nt, Rattus norvegicus; identical to SEQ ID NO: 4125

SEQ ID NO: 4129 - RNA, 87 nt, Rattus norvegicus; identical to SEQ ID NO: 3750

SEQ ID NO: 4130 - RNA, 59 nt, Canis familiaris
guguucacagcggaccuugauuuaaauguccauacaauuaaggcacgcggugaaugcca

SEQ ID NO: 4131 - RNA, 57 nt, Canis familiaris
guguucacagcggaccuugauuuaaugucauacaauuaaggcacgcggugaaugcca

SEQ ID NO: 4132 - RNA, 58 nt, Canis familiaris
guguucacagcggaccuugauuuaauguccauacaauuaaggcacgcggugaaugcca

SEQ ID NO: 4133 - RNA, 82 nt, Danio rerio
ggcucucgcuguacguguucacaguggaccuugauuuauuguauuucaauuaaggcacgcggugaaugccaacagcacagcc

SEQ ID NO: 4134 - RNA, 83 nt, Danio rerio
ccugcuuuucuucguguucacagcggaccuugauuuaaauguccauacaauuaaggcacgcggugaaugccaagagagauggc

SEQ ID NO: 4135 - RNA, 117 nt, Danio rerio
ggcucugugggauuucagacucuggcuuuccguguucacagcggaccuugauuuaaugucuuacaauuaaggcacgcggugaaugccaagagcggagccuuuuaacaucagcaggcc

SEQ ID NO: 4136 - RNA, 83 nt, Danio rerio
gguuuuugcucuuuguguucacaguggaccuugauuuaauuucaauacaauuaaggcacgcggugaaugccaagagagaagcc

SEQ ID NO: 4137 - RNA, 129 nt, Danio rerio
ggguuuugcucgugcguucuuuuugaguucucgcucugcguguucacagcggaccuugauuuaauguccauacaauuaaggcacgcggugaaugccaagagaagaaucucuccagcaacgaguuugcgc

SEQ ID NO: 4138 - RNA, 113 nt, Danio rerio
ggguggugacacaggcccgccacucugcguguucacggcggaccuugauuuaauauccauacaauuaaggcacgcggugaaugccaagagaggggucuuaaaacgacaaaccc

SEQ ID NO: 4139 - RNA, 77 nt, Fugu rubripes
gguugugucucuccguguucacagcggaccuugauuuaaugucuuacaauuaaggcacgcggugaaugccaagagau

SEQ ID NO: 4140 - RNA, 78 nt, Fugu rubripes
cuggucucuccucguguucacagcggaccuugauuuaaauguccauacaauuaaggcacgcggugaaugccaagagag

SEQ ID NO: 4141 - RNA, 83 nt, Fugu rubripes
gguuugagcucuuuguguucacaguggaccuugauuuaauuucaauacaauuaaggcacgcggugaaugccaagagagaagcc

SEQ ID NO: 4142 - RNA, 67 nt, Tetraodon nigroviridis
cucuccguguucacagcggaccuugauuuaaugucuuacaauuaaggcacgcggugaaugccaagag

SEQ ID NO: 4143 - RNA, 75 nt, Tetraodon nigroviridis
gccucuccucguguucacagcggaccuugauuuaaauguccauacaauuaaggcacgcggugaaugccaagagag

SEQ ID NO: 4144 - RNA, 80 nt, Tetraodon nigroviridis
gguuugagcucuuuguguucacaguggaccuugauuuaauuucaauacaauuaaggcacgcggugaaugccaagagagaa

SEQ ID NO: 4145 - RNA, 98 nt, Homo sapiens
agaaugggcaaaugaacaguaaauuuggaggccuggggcccucccugcugcuggagaaguguuugcacgggugggccuugucuuugaaaggaggugga

SEQ ID NO: 4146 - RNA, 122 nt, Mus musculus
uccaccugucucugccucccgagugcuggaauuaaaggcaugcaccaccacugcccggcagguucuguuauuucugagugugagaaauauauggggaaaagucuucauggugaguccaaagg

SEQ ID NO: 4147 - RNA, 64 nt, Xenopus tropicalis
cuucaagugcuguucgugcagguagcuuaauaacagaccuacugcaugggcggcacuucccaag

SEQ ID NO: 4148 - DNA, 21 bp, Artificial Sequence
  Synthetic Sequence
aatgtgctatctggatcctag

1. A mast cell degranulation control agent comprising as an active ingredient any one of the nucleic acids (a) to (h) below:
(a) a nucleic acid consisting of a nucleotide sequence of any one of SEQ ID NOs:1 to 1543 and 3372 to 3741,
(b) a nucleic acid of 17 to 28 nucleotides comprising a nucleic acid consisting of a nucleotide sequence of any one of SEQ ID NOs:1 to 1543 and 3372 to 3741,
(c) a nucleic acid consisting of a nucleotide sequence having an identity of 90% or more to a nucleotide sequence of any one of SEQ ID NOs:1 to 1543 and 3372 to 3741,
(d) a nucleic acid that hybridizes under stringent conditions with a complementary strand for a nucleic acid consisting of a nucleotide sequence of any one of SEQ ID NOs:1 to 1543 and 3372 to 3741,
(e) a nucleic acid comprising the 2nd to 8th nucleotides of a nucleotide sequence of any one of SEQ ID NOs:1 to 1543 and 3372 to 3741,
(f) a nucleic acid consisting of a nucleotide sequence of any one of SEQ ID NOs:1544 to 3371 and 3742 to 4147,
(g) a nucleic acid consisting of a nucleotide sequence having an identity of 90% or more to a nucleotide sequence of any one of SEQ ID NOs:1544 to 3371 and 3742 to 4147, and
(h) a nucleic acid that hybridizes under stringent conditions with a complementary strand for a nucleic acid consisting of a nucleotide sequence of any one of SEQ ID NOs:1544 to 3371 and 3742 to 4147.

2. The mast cell degranulation control agent according to claim 1, wherein the nucleic acid is a micro-RNA or a micro-RNA precursor.

3. A mast cell degranulation control agent comprising as an active ingredient a nucleic acid consisting of a nucleotide sequence complementary to the nucleotide sequence of the nucleic acid of claim 1.

4. A mast cell degranulation control agent comprising as an active ingredient a double-stranded nucleic acid consisting of the nucleic acid of claim 1 and a nucleic acid consisting of a nucleotide sequence complementary to the nucleotide sequence of the former nucleic acid.

5. A mast cell degranulation control agent comprising as an active ingredient a vector that expresses the nucleic acid of claim 1.

6. A mast cell degranulation control agent comprising as an active ingredient a substance that controls the expression or a function of the nucleic acid of claim 1.

7. The mast cell degranulation control agent according to claim 6, wherein the substance that controls the expression or a function of the nucleic acid is an siRNA or an antisense oligonucleotide.

8. A mast cell degranulation control agent comprising as an active ingredient a substance that suppresses the expression of a target gene for the nucleic acid of claim 1.

9. The mast cell degranulation control agent according to claim 8, wherein the substance that suppresses the expression of a target sequence for a nucleic acid is an siRNA or an antisense oligonucleotide.

10. A diagnostic agent or therapeutic agent for a disease resulting from an abnormality of mast cells, comprising as an active ingredient the nucleic acid of claim 1.

11. A diagnostic agent for a disease resulting from an abnormality of mast cells, comprising as an active ingredient a reagent for detecting the amount expressed of the nucleic acid of claim 1, a mutation of the nucleic acid or a mutation of the genome that encodes the nucleic acid.

12. The diagnostic agent or therapeutic agent according to claim 10, wherein the disease resulting from an abnormality of mast cells is a disease selected from the group consisting of atopic dermatitis, asthma, chronic obstructive pulmonary disease and allergic diseases.

13. A method for treating a disease resulting from an abnormality of mast cells, comprising administering an effective amount of the degranulation suppressant of claim 1 to a subject in need thereof, thereby treating a disease resulting from an abnormality of mast cells in the subject.

14. The method according to claim 13, wherein the disease resulting from an abnormality of mast cells is a disease selected from the group consisting of atopic dermatitis, asthma, chronic obstructive pulmonary disease and allergic diseases.

15. A use of the degranulation suppressant of claim 1 for producing a therapeutic agent for a disease resulting from an abnormality of mast cells.

16. The use according to claim 15, wherein the disease resulting from an abnormality of mast cells is a disease selected from the group consisting of atopic dermatitis, asthma, chronic obstructive pulmonary disease and allergic diseases.

17. A method of controlling mast cell degranulation, comprising using the nucleic acid of claim 1.

18. A screening method for a mast cell degranulation control agent, wherein the promotion or suppression of the expression or a function of the nucleic acid of claim 1 serves as an index.

19. A mast cell degranulation control agent comprising as an active ingredient a vector that expresses the double-stranded nucleic acid of claim 4.

20. A diagnostic agent or therapeutic agent for a disease resulting from an abnormality of mast cells, comprising as an active ingredient the double-stranded nucleic acid of claim 4.

21. The diagnostic agent according to claim 11, wherein the disease resulting from an abnormality of mast cells is a disease selected from the group consisting of atopic dermatitis, asthma, chronic obstructive pulmonary disease and allergic diseases.

22. A method for treating a disease resulting from an abnormality of mast cells, comprising administering an effective amount of the degranulation suppressant of claim 4 to a subject in need thereof, thereby treating a disease resulting from an abnormality of mast cells in the subject.

23. The method according to claim 22, wherein the disease resulting from an abnormality of mast cells is a disease selected from the group consisting of atopic dermatitis, asthma, chronic obstructive pulmonary disease and allergic diseases.

24. A method of controlling mast cell degranulation, comprising using the double-stranded nucleic acid of claim 4.
